(19) United States
(12) Patent Application Publication
(10) Pub. No.: US 2003/0092616 A1
(43) Pub. Date: May 15, 2003

(54) STAT6 activation gene

(76) Inventors: Akio Matsuda, Shizuoka (JP); Goichi Honda, Shizuoka (JP); Shuji Muramatsu, Shizuoka (JP); Kenya Ishizawa, Shizuoka (JP)

Correspondence Address: BIRCH STEWART KOLASCH & BIRCH, PO BOX 747, FALLS CHURCH, VA, 22040-0747, US

(21) Appl. No.: 10/153,668

(22) Filed: May 24, 2002

Related U.S. Application Data
(60) Provisional application No. 60/293,172, filed on May 25, 2001.
(60) Provisional application No. 60/316,031, filed on Aug. 31, 2001.
(60) Provisional application No. 60/328,403, filed on Oct. 12, 2001.

(30) Foreign Application Priority Data
May 25, 2001 (JP) 157043/2001
Aug. 30, 2001 (JP) 260681/2001
Oct. 10, 2001 (JP) 313175/2001

(51) Int. Cl. A61K 38/17; C12P 21/02; C12N 5/06; C07H 21/04; C07K 14/435

(52) U.S. Cl. 514/12; 530/350; 435/69.1; 435/320.1; 435/325; 536/23.1

(57) ABSTRACT

Proteins having activity that promotes STAT6 activation, which are used for diagnosing, treating or preventing diseases associated with the excessive activation or inhibition of STAT6 are provided. Using a STAT6 response reporter plasmid, cDNA encoding a protein capable of promoting STAT6 activation was cloned from the cDNA library constructed from human lung fibroblasts, and the DNA sequence and the deduced amino acid sequence are determined. The protein, the DNA encoding the protein, a recombinant vector containing the DNA, and a transformant containing the recombinant vector are useful for screening a substance inhibiting or promoting STAT6 activation.

### TECHNICAL FIELD

[0001] The present invention relates to a protein capable of promoting STAT6 activation, a DNA sequence encoding the protein, a method for obtaining the DNA, a recombinant vector containing the DNA, a transformant containing the recombinant vector, and an antibody which reacts with the protein. The present invention also relates to use of the protein, DNA molecule or antibody of the invention in the diagnosis, treatment or prevention of diseases associated with the excessive activation or inhibition of STAT6.

[0002] The present invention also relates to a method for screening a substance capable of inhibiting or promoting STAT6 activation by using the protein, DNA, recombinant vector and transformant.

### BACKGROUND ART

[0003] Mosmann et al. advocated that helper T cells (the term will be abbreviated as “Th” hereinafter) which play an important role in immune response, should be classified into two different subsets (J. Immunol. (1986) 136:2348-2357). They classified these cells into two types of cell, Th1 and Th2 based on their cytokine-production pattern. Th1 cell produces interleukin2 (IL-2), interferon γ (IFN-γ), tumor necrosis factor β (TNF-β) etc., referred as Th1 type cytokines, and activates cell-mediated immunity, for example, in viral infection. On the other hand, Th2 cell produces interleukin4 (IL-4), interleukin5 (IL-5), interleukin10 (IL-10), interleukin13 (IL-13) etc., referred as Th2 type cytokines, and is involved in humoral immunity including infection of intracellular cytozoic microorganisms such as parasites and production of an antibody against exposure to an antigen/allergen. Thus, the idea of classifying various immune responses in a body depending on Th cell types to comprehend disease immune responses in view of the balance between Th1 and Th2 cells, has emerged, and a concept of Th1/Th2 diseases has also been suggested.

[0004] Since Th2 produces a number of cytokines involved in allergic reaction, hyperactive Th2 is considered to cause allergic disease such as asthma or the like.

[0005] IL-4 is an immunomodulatory cytokine which is secreted due to activation of T lymphocytes, basocytes, and mast cells. IL-4 induces proliferation of B cells and production of IgE and IgG1 as well as activation and proliferation of mast cells. It also induces gene expression of VCAM-1 which functions when a basocyte adheres to a vascular endothelical cell and infiltrates into tissues. Furthermore, IL-4 has been shown to play an important role in differentiation into a Th2 cell and proliferation and differentiation of a hemopoietic progenitor cell.

[0006] IL-13 is a cytokine secreted due to activation of T lymphocytes, mast cells, basocytes, NK cells, and dendritic cells. It has approximately 30% sequence identity to IL-4 and shows IL-4-like activity against monocyte/macrophage, B cell. However, IL-13 does not act on T cells.

[0007] Binding of IL-4 and IL-13 with their receptors on the cell surface activates intracellular tyrosine kinase, transmitting signals into the cell via tyrosine phosphorylation of some intracellular proteins. Recent developments in molecular biology have elucidated a signaling mechanism from the IL-4 receptor, and major intracellular transducer molecules have been identified. Among them, STAT6 has been found to be the most important molecule.

[0008] STAT6 is a member of a STAT (Signal transducer and Activator of Transcription) family. STAT is a transcription factor which functions depending on stimulations downstream of various cytokine receptors and growth factor receptors. In mammals, seven types, STATI, 2, 3, 4, 5a, 5b, and 6 have been identified so far. Binding of a ligand such as a cytokine with its receptor activates a receptor-associated tyrosine kinase referred as JAK family, and the activated JAK phosphorylates the tyrosine residues of the receptor itself, thereby causing activation of the STAT molecule. The activation of STAT6 molecule forms dimers and moves to the nucleus promptly, inducing gene expression.

[0009] JAK is activated via a IL-4 and a IL-13 receptor, and tyrosines on the receptors are phosphorylated. Subsequently, STAT6 binds to phosphorylated tyrosine residues of the receptors via SH2 domain, and STAT6 per se is tyrosine phosphorylated and forms homodimers, then moves to a nucleus. Known genes regulated by STAT6 include germline epsilon, CD23, MHC (Major Histocompatibility Complex) class II antigen, STAT6 gene, etc.

[0010] Recently, STAT6 defective mouse has been created and the physiological roles of STAT6 have been examined.

[0011] The fact that, in the STAT6 defective mouse, the major functions of IL-4 and IL-13 are all disturbed has demonstrated that STAT6 is a major molecule in signal transduction of IL-4 and IL-13. Further, the fact that Th2 reactions are disturbed in said mouse and that little production of Th2 type cytokine is confirmed demonstrated that STAT6 is also an essential molecule in Th2 cell differentiation.

[0012] Thus, STAT6 has been proved to be an important molecule in induction of allergic reaction.

[0013] In this context, the inhibition of function or activation of STAT6 may specifically inhibit the function of IL-4 and IL-13, repressing allergic disease, inflammatory or immunological diseases. Thus, the protein involved in STAT6 activation is a promising target for medicaments against diseases caused or characterized by allergic disease, autoimmunity or inflammation [see e.g., Proc. Natl. Acad. Sci. USA 95, 172-177 (1998), Science 282, 2258-2261 (1998), Science 282, 2261-2263 (1998), J. Exp. Med. 183, 109-117 (1996), J. Immunol. 160,4004-4009 (1998), J. Immunol. 160,1581-1588 (1998)].

[0014] Extracellular information is converted into a certain signal, which passes through the cell membrane and goes through the cytoplasm to the nucleus, where it regulates the expression of the target gene and causes cell responses. Therefore the elucidation of the mechanism of intracellular signal transduction from extracellular stimuli to STAT6 activation is of very important significance, because it provides very important means of developing new medicaments or therapies against autoimmune diseases and diseases exhibiting allergic disease, autoimmunity, or inflammatory symptoms.

[0015] It is considered, however, that the signal transduction pathway from a certain cell stimulis to STAT6 activation includes the existence of some other molecules which regulate and control the pathway in addition to JAK kinase and STAT molecule. Therefore it is desirable for more efficient drug discovery to identify the transmitters which play a key role in the pathway, and to focus research on the transmitters to establish a new drug-screening method. However, apart from JAK/STAT molecules, most of the mechanism of the signaling pathway via STAT6 remains unknown, and the identification of new signaling molecules and elucidation of the STAT6 activation mechanism are desired.

### DISCLOSURE OF TH INVENTION

[0016] The object of the present invention is to identify a new gene and protein capable of promoting STAT6 activation, and to provide a method of use of them in medicaments, diagnostics and therapy. That is, the present invention provides a new protein capable of promoting STAT6 activation, a DNA sequence encoding the protein, a recombinant vector containing the DNA, a transformant containing the recombinant vector, a process for producing the protein, an antibody directed against the protein or a peptide fragment thereof, and a process for producing the antibody.

[0017] The present invention also provides a method for screening a substance capable of inhibiting or promoting STAT6 activation, a kit for the screening, a substance capable of inhibiting or promoting STAT6 activation obtainable by the screening method or the screening kit, a process for producing the substance, a pharmaceutical composition containing a substance capable of inhibiting or promoting STAT6 activation, etc.

[0018] Recently, random analysis of cDNA molecules has been intensively carried out to analyze various genes, which are expressed in vivo. The cDNA fragments thus obtained have been entered for databases and published as ESTs (Expressed Sequence Tags, e.g., http//www.ncbi.nlm.nih.gov/dbEST). However, ESTs are merely sequence information, and it is difficult to predict their functions. ESTs are also arranged in UniGene (http//www.ncbi.nlm.nih.gov/UniGene), and about 80,000 human ETSs have been registered until now. However, most of these ESTs have their 5′ end nucleotide sequences deleted, and contain no translation initiation site. Therefore it is unlikely that such analysis will directly lead to gene functional analysis such as the analysis of protein functions on the assumption of the determination of mRNA coding regions and the understanding of gene expression control by the analysis of promoters.

[0019] On the other hand, one method to elucidate functions of gene products (i.e., proteins) is transient expression cloning method using animal cells [see e.g., “Idenshi Kougaku Handbook (Genetic Engineering Handbook)”, an extra issue of “Jikken Igaku (Experimental Medicine)”, YODOSHA CO., LTD.]. This method involves transfecting animal cells with a cDNA library constructed using an animal cell expression vector to directly express a functional protein, and identifying and cloning the cDNA based on the biological activity of the protein having an effect on the cells. This method requires no chemical information (amino acid sequences and molecular weights) regarding the target protein product as a prerequisite, and allows the identification of cDNA clones by detecting specific biological activity of the protein expressed in the cells or culture.

[0020] For the efficient expression cloning, there is a need to devise a method of preparing a cDNA library. Several methods have been widely used to construct cDNA libraries [e.g., the method of Gubbler-Hoffman: Gene 25 (1983); and the method of Okayama-Berg: Mol. Cell. Biol. 2 (1982)]. However, most of the cDNA molecules prepared by these methods have their 5′ end nucleotide sequences deleted, and thus these methods rarely produce full-length cDNA, a complete DNA copy of mRNA. This is because the reverse transcriptase used to prepare cDNA from mRNA does not necessarily have high efficiency in producing full-length cDNA. Therefore it is necessary to improve these prior art methods in order to efficiently carry out the above expression cloning.

[0021] In addition, in order to carry out the functional analysis of genes, it is essential to clone full-length cDNA sequences and express proteins from them. Therefore, it has been necessary to construct cDNA libraries containing enriched full-length cDNA for efficient expression cloning.

[0022] The present inventors have intensively studied to solve the above problems. As a result, the present inventors have succeeded in constructing a full-length cDNA library by using the oligo-capping method; establishing a gene function assay system by expression cloning using NIH3T3 cells; and isolating a new DNA (cDNA) encoding a protein having a function of promoting STAT6 activation by using the assay system. This new DNA molecule induced promotion of STAT6 activation by its expression in NIH3T3 cells. This result shows that this new DNA is a signal transduction molecule involved in promotion of STAT6 activation. Thus, the present invention has been completed.

[0023] That is, the present invention relates to:

[0024] (1) A purified and isolated protein selected from the group consisting of:

[0025] (a) a protein which consists of an amino acid sequence selected from the group consisting of SEQ ID NOS: 1, 3, 5, 7, 9, 11, 13, 15, 17, 19, 21, 23, 25, 27, 29, 31, 33, 35, 37, 39, 41, 43, 45, 47, 49, 51, 53, 55, 57, 59, 61, 63, 65, 67, 70, 72, 74, 76, 78, 80, 82, 84, 86, 88, 90, 92, 94, 96, 98, 100, 102, 104, 106, 108, 110, 112, 114, 116, 118, 120, 122, 124, 126, 128, 130, 132, 134, 136, 138, 140, 142, 144, 146, 148, 150, 152, 154, 156, 158, 160, 162, 164, 166, 168, 170, 172, 174, 176, 178, 180, 182, 184, 186, 188, 190, 192, 194, 196, 198, 200, 202, 204, 206, 208, 210, 212, 214, 216, 218, 220, 222, 224, 226, 228, 230, 232, 234, 236, 238, 240, 242, 244, 246, 248, 250, 252, 254, 256, 258, 260, 262, 264, 266, 268, 270, 272, 274, 276, 278, 280, 282, 284, 286, 288, 290, 292, 294, 296, 298, 300, 302, 304, 306, 308, 310, 312, 314, 316, 318, 320, 322, 324, 326, 328, 330, 332, 334, 336, 338, 340, 342, 344, 346, 348, 350, 352, 354, 356, 358, 360, 362, 364, 366, 368, 370, 372, 374, 376, 378, 380, 382, 384, 386, 388, 390, 392, 394, 396, 398, 400, 402, 404, 406, 408, 410, 412, 414, 416, 418, 420, 422, 424, 426, 428, 430, 432, 434, 436, 438, 440, 442, 444, 446, 448, 450, 452, 454, 456, 458, 460, 462, 464, 466, 468, 470, 472, 474, 476, 478, 480, 482 and 484; and

[0026] (b) a protein that promotes STAT6 activation and consists of an amino acid sequence having at least one amino acid deletion, substitution or addition in an amino acid sequence selected from the group consisting of SEQ ID NOS: 1, 3, 5, 7, 9, 11, 13, 15, 17, 19, 21, 23, 25, 27, 29, 31, 33, 35, 37, 39, 41, 43, 45, 47, 49, 51, 53, 55, 57, 59, 61, 63, 65, 67, 70, 72, 74, 76, 78, 80, 82, 84, 86, 88, 90, 92, 94, 96, 98, 100, 102, 104, 106, 108, 110, 112, 114, 116, 118, 120, 122, 124, 126, 128, 130, 132, 134, 136, 138, 140, 142, 144, 146, 148, 150, 152, 154, 156, 158, 160, 162, 164, 166, 168, 170, 172, 174, 176, 178, 180, 182, 184, 186, 188, 190, 192, 194, 196, 198, 200, 202, 204, 206, 208, 210, 212, 214, 216, 218, 220, 222, 224, 226, 228, 230, 232, 234, 236, 238, 240, 242, 244, 246, 248, 250, 252, 254, 256, 258, 260, 262, 264, 266, 268, 270, 272, 274, 276, 278, 280, 282, 284, 286, 288, 290, 292, 294, 296, 298, 300, 302, 304, 306, 308, 310, 312, 314, 316, 318, 320, 322, 324, 326, 328, 330, 332, 334, 336, 338, 340, 342, 344, 346, 348, 350, 352, 354, 356, 358, 360, 362, 364, 366, 368, 370, 372, 374, 376, 378, 380, 382, 384, 386, 388, 390, 392, 394, 396, 398, 400, 402, 404, 406, 408, 410, 412, 414, 416, 418, 420, 422, 424, 426, 428, 430, 432, 434, 436, 438, 440, 442, 444, 446, 448, 450, 452, 454, 456, 458, 460, 462, 464, 466, 468, 470, 472, 474, 476, 478, 480, 482 and 484.

[0027] (2) A purified and/or isolated protein that promotes STAT6 activation and comprises an amino acid sequence having at least 95% identity to any one of the proteins according to above item (1) over the entire length thereof,

[0028] (3) An isolated polynucleotide which consists of or comprises a nucleotide sequence encoding a protein selected from the group consisting of:

[0029] (a) a protein which comprises an amino acid sequence selected from the group consisting of SEQ ID NOS: 1, 3, 5, 7, 9, 11, 13, 15, 17, 19, 21, 23, 25, 27, 29, 31, 33, 35, 37, 39, 41, 43, 45, 47, 49, 51, 53, 55, 57, 59, 61, 63, 65, 67, 70, 72, 74, 76, 78, 80, 82, 84, 86, 88, 90, 92, 94, 96, 98, 100, 102, 104, 106, 108, 110, 112, 114, 116, 118, 120, 122, 124, 126, 128, 130, 132, 134, 136, 138, 140, 142, 144, 146, 148, 150, 152, 154, 156, 158, 160, 162, 164, 166, 168, 170, 172, 174, 176, 178, 180, 182, 184, 186, 188, 190, 192, 194, 196, 198, 200, 202, 204, 206, 208, 210, 212, 214, 216, 218, 220, 222, 224, 226, 228, 230, 232, 234, 236, 238, 240, 242, 244, 246, 248, 250, 252, 254, 256, 258, 260, 262, 264, 266, 268, 270, 272, 274, 276, 278, 280, 282, 284, 286, 288, 290, 292, 294, 296, 298, 300, 302, 304, 306, 308, 310, 312, 314, 316, 318, 320, 322, 324, 326, 328, 330, 332, 334, 336, 338, 340, 342, 344, 346, 348, 350, 352, 354, 356, 358, 360, 362, 364, 366, 368, 370, 372, 374, 376, 378, 380, 382, 384, 386, 388, 390, 392, 394, 396, 398, 400, 402, 404, 406, 408, 410, 412, 414, 416, 418, 420, 422, 424, 426, 428, 430, 432, 434, 436, 438, 440, 442, 444, 446, 448, 450, 452, 454, 456, 458, 460, 462, 464, 466, 468, 470, 472, 474, 476, 478, 480, 482 and 484; and

[0030] (b) a protein that promotes STAT6 activation and consists of an amino acid sequence having at least one amino acid deletion, substitution or addition in an amino acid sequence selected from the group consisting of SEQ ID NOS: 1, 3, 5, 7, 9, 11, 13, 15, 17, 19, 21, 23, 25, 27, 29, 31, 33, 35, 37, 39, 41, 43, 45, 47, 49, 51, 53, 55, 57, 59, 61, 63, 65, 67, 70, 72, 74, 76, 78, 80, 82, 84, 86, 88, 90, 92, 94, 96, 98, 100, 102, 104, 106, 108, 110, 112, 114, 116, 118, 120, 122, 124, 126, 128, 130, 132, 134, 136, 138, 140, 142, 144, 146, 148, 150, 152, 154, 156, 158, 160, 162, 164, 166, 168, 170, 172, 174, 176, 178, 180, 182, 184, 186, 188, 190, 192, 194, 196, 198, 200, 202, 204, 206, 208, 210, 212, 214, 216, 218, 220, 222, 224, 226, 228, 230, 232, 234, 236, 238, 240, 242, 244, 246, 248, 250, 252, 254, 256, 258, 260, 262, 264, 266, 268, 270, 272, 274, 276, 278, 280, 282, 284, 286, 288, 290, 292, 294, 296, 298, 300, 302, 304, 306, 308, 310, 312, 314, 316, 318, 320, 322, 324, 326, 328, 330, 332, 334, 336, 338, 340, 342, 344, 346, 348, 350, 352, 354, 356, 358, 360, 362, 364, 366, 368, 370, 372, 374, 376, 378, 380, 382, 384, 386, 388, 390, 392, 394, 396, 398, 400, 402, 404, 406, 408, 410, 412, 414, 416, 418, 420, 422, 424, 426, 428, 430, 432, 434, 436, 438, 440, 442, 444, 446, 448, 450, 452, 454, 456, 458, 460, 462, 464, 466, 468, 470, 472, 474, 476, 478, 480, 482 and 484;

[0031] (4) An isolated polynucleotide comprising a polynucleotide sequence selected from the group consisting of:

[0032] (a) a polynucleotide represented by any one of SEQ ID NOS: 2, 4, 6, 8, 10, 12, 14, 16, 18, 20, 22, 24, 26, 28, 30, 32, 34, 36, 38, 40, 42, 44, 46, 48, 50, 52, 54, 56, 58, 60, 62, 64, 66, 68, 69, 71, 73, 75, 77, 79, 81, 83, 85, 87, 89, 91, 93, 95, 97, 99, 101, 103, 105, 107, 109, 111, 113, 115, 117, 119, 121, 123, 125, 127, 129, 131, 133, 135, 137, 139, 141, 143, 145, 147, 149, 151, 153, 155, 157, 159, 161, 163, 165, 167, 169, 171, 173, 175, 177, 179, 181, 183, 185, 187, 189, 191, 193, 195, 197, 199, 201, 203, 205, 207, 209, 211, 213, 215, 217, 219, 221, 223, 225, 227, 229, 231, 233, 235, 237, 239, 241, 243, 245, 247, 249, 251, 253, 255, 257, 259, 261, 263, 265, 267, 269, 271, 273, 275, 277, 279, 281, 283, 285, 287, 289, 291, 293, 295, 297, 299, 301, 303, 305, 307, 309, 311, 313, 315, 317, 319, 321, 323, 325, 327, 329, 331, 333, 335, 337, 339, 341, 343, 345, 347, 349, 351, 353, 355, 357, 359, 361, 363, 365, 367, 369, 371, 373, 375, 377, 379, 381, 383, 385, 387, 389, 391, 393, 395, 397, 399, 401, 403, 405, 407, 409, 411, 413, 415, 417, 419, 421, 423, 425, 427, 429, 431, 433, 435, 437, 439, 441, 443, 445, 447, 449, 451, 453, 455, 457, 459, 461, 463, 465, 467, 469, 471, 473, 475, 477, 479, 481 and 483; and a polynucleotide sequence complementary to said isolated polynucleotide;

[0033] (b) a polynucleotide sequence encoding a protein that promotes STAT6 activation and hybridizing with a polynucleotide having any one of the polynucleotide sequences of (a) under stringent conditions; and

[0034] (c) a polynucleotide sequence which encodes a protein that promotes STAT6 activation, and which consists of a polynucleotide sequence having at least one nucleotide deletion, substitution or addition in a polynucleotide sequence selected from the group consisting of SEQ ID NOS: 2, 4, 6, 8, 10, 12, 14, 16, 18, 20, 22, 24, 26, 28, 30, 32, 34, 36, 38, 40, 42, 44, 46, 48, 50, 52, 54, 56, 58, 60, 62, 64, 66, 68, 69, 71, 73, 75, 77, 79, 81, 83, 85, 87, 89, 91, 93, 95, 97, 99, 101, 103, 105, 107, 109, 111, 113, 115, 117, 119, 121, 123, 125, 127, 129, 131, 133, 135, 137, 139, 141, 143, 145, 147, 149, 151, 153, 155, 157, 159, 161, 163, 165, 167, 169, 171, 173, 175, 177, 179, 181, 183, 185, 187, 189, 191, 193, 195, 197, 199, 201, 203, 205, 207, 209, 211, 213, 215, 217, 219, 221, 223, 225, 227, 229, 231, 233, 235, 237, 239, 241, 243, 245, 247, 249, 251, 253, 255, 257, 259, 261, 263, 265, 267, 269, 271, 273, 275, 277, 279, 281, 283, 285, 287, 289, 291, 293, 295, 297, 299, 301, 303, 305, 307, 309, 311, 313, 315, 317, 319, 321, 323, 325, 327, 329, 331, 333, 335, 337, 339, 341, 343, 345, 347, 349, 351, 353, 355, 357, 359, 361, 363, 365, 367, 369, 371, 373, 375, 377, 379, 381, 383, 385, 387, 389, 391, 393, 395, 397, 399, 401, 403, 405, 407, 409, 411, 413, 415, 417, 419, 421, 423, 425, 427, 429, 431, 433, 435, 437, 439, 441, 443, 445, 447, 449, 451, 453, 455, 457, 459, 461, 463, 465, 467, 469, 471, 473, 475, 477, 479, 481 and 483.

[0035] (5) An isolated polynucleotide comprising a nucleotide sequence which encodes a protein that promotes STAT6 activation and has at least 95% identity to any one of the polynucleotide sequences according to above item (3) over the entire length thereof;

[0036] (6) An isolated polynucleotide comprising a nucleotide sequence which encodes a protein that promotes STAT6 activation and has at least 95% identity to any one of the polynucleotide sequences according to above item (4) over the entire length thereof,

[0037] (7) A purified and/or isolated protein encoded by the polynucleotide according to any one of above items (3) to (6);

[0038] (8) A recombinant vector which comprises a polynucleotide according any one of above items (3) to (6).

[0039] (9) A transformed cell which comprises the recombinant vector according to above item (8).

[0040] (10) A membrane of the cell according to above item (9), when the protein according to above item (1) or (2) is a membrane protein.

[0041] (11) A process for producing a protein comprising,

[0042] (a) culturing a transformed cell comprising any one of the isolated polynucleotides according to any one of items (3) to (6), under conditions providing expression of the encoded protein; and

[0043] (b) recovering the protein from the culture product.

[0044] (12) A process for diagnosing a disease or a susceptibility to a disease in a subject related to expression or activity of the protein of item (1), (2) or (7) in a subject comprising:

[0045] (a) determining the presence or absence of a mutation in the nucleotide sequence encoding said protein in the genome of said subject; and/or

[0046] (b) analyzing the amount of expression of said protein in a sample derived from said subject, wherein a diagnosis of disease is made according to an increase or decrease in the amount of the protein expressed, wherein a diagnosis of disease is preferably made where the amount of protein expressed is 2-fold or higher than normal, or half or lower than normal.

[0047] (13) A method for screening a compound for activity as inhibitors or activators of STAT6, which comprises the steps of:

[0048] (a) providing a cell with a gene encoding a protein that promotes STAT6 activation, and a component that provides a detectable signal associated with activation of STAT6;

[0049] (b) culturing the transformed cell under conditions, which permit the expression of the gene in the transformed cell;

[0050] (c) contacting the transformed cell with one or more compounds; and

[0051] (d) measuring the detectable signal; and

[0052] (e) isolating or identifying as an activator compound and/or an inhibitor compound according to the detectable signal.

[0053] (14) A process for producing a pharmaceutical composition, which comprises the steps of:

[0054] (a) providing a cell with a gene encoding a protein that promotes STAT6 activation, and a component capable of providing a detectable signal;

[0055] (b) culturing the transformed cell under conditions, which permit the expression of the gene in the transformed cell;

[0056] (c) contacting the transformed cell with one or more candidate compounds;

[0057] (d) measuring the detectable signal; and

[0058] (e) isolating or identifying as an activator compound and/or an inhibitor compound according to the detectable signal; and

[0059] (f) optimizing the isolated or identified compound as a pharmaceutical composition.

[0060] (15) A kit for screening a compound for activity as an inhibitor or activator of STAT6, which comprises:

[0061] (a) a cell comprising a gene encoding a protein that promotes STAT6 activation, and a component that provides a detectable signal upon activation of STAT6; and

[0062] (b) reagents for measuring the detectable signal.

[0063] (16) A monoclonal or polyclonal antibody that reacts with the protein according to above item (1), (2) or (7).

[0064] (17) A process for producing a monoclonal or polyclonal antibody that reacts with the protein of above item (1), (2) or (7) which comprises administering the protein according to above item (1), (2) or (7) as an antigen or epitope-bearing fragments to a non-human animal.

[0065] (18) An antisense oligonucleotide complementary to the polynucleotide according to any one of above items (3) to (6), which prevents expression of protein that promotes STAT6 activation.

[0066] (19) A ribozyme which inhibits STAT6 activation by cleavage of RNA that encodes the protein of above item (1), (2) or (7), or by cleavage of RNA that encodes some protein of the pathway that leads to STAT6 activation.

[0067] (20) A method for treating a disease, which comprises administering to a subject an amount of a compound screened by the process according to above item (13), and/or a monoclonal or polyclonal antibody according to above item (16), and/or an antisense oligonucleotide according to above item (18), and/or a ribozyme according to above item (19) effective to treat a disease selected from the group consisting of allergic disease, inflammation, autoimmune diseases, diabetes, hyperlipidemia, infectious disease and cancers.

[0068] (21) A pharmaceutical composition produced according to item (14) as inhibiting or promoting STAT6 activation.

[0069] (22) A pharmaceutical composition according to item (21) for the treatment of allergic disease, inflammation, autoimmune diseases, cancers and viral infections.

[0070] (23) A method of treating allergic disease, inflammation, autoimmune diseases, cancers or viral infections, which comprising administering a pharmaceutical composition produced according to above item (14) to a patient suffering from a disease related to STAT6 activation.

[0071] (24) A pharmaceutical composition according to item (21) for the treatment of Th1 hyperactive diseases, for example, organ-specific autoimmune diseases such as multiple sclerosis and insulin-dependent diabetes mellitus, and rheumatism.

[0072] (25) A method of treating Th1 hyperactive diseases, for example, organ-specific autoimmune diseases such as multiple sclerosis and insulin-dependent diabetes mellitus, and rheumatism, which comprises administering a pharmaceutical composition produced according to above item (14) to a patient suffering a disease related to inhibition of STAT6 activation.

[0073] (26) A pharmaceutical composition which comprises a monoclonal or polyclonal antibody according to item (16)as an active ingredient.

[0074] (27) A pharmaceutical composition which comprises an antisense oligonucleotide according to item (18) as an active ingredient.

[0075] (28) The pharmaceutical composition according to item (26) or (27), wherein the target disease is selected from the group consisting of allergic disease, inflammation, autoimmune diseases, diabetes, hyperlipidemia, infections diseases and cancers.

[0076] (29) A computer-readable medium on which a sequence data set has been stored, said sequence data set comprising at least one nucleotide sequence selected from the group consisting of SEQ ID NOS: 2, 4, 6, 8, 10, 12, 14, 16, 18, 20, 22, 24, 26, 28, 30, 32, 34, 36, 38, 40, 42, 44, 46, 48, 50, 52, 54, 56, 58, 60, 62, 64, 66, 68, 69, 71, 73, 75, 77, 79, 81, 83, 85, 87, 89, 91, 93, 95, 97, 99, 101, 103, 105, 107, 109, 111, 113, 115, 117, 119, 121, 123, 125, 127, 129, 131, 133, 135, 137, 139, 141, 143, 145, 147, 149, 151, 153, 155, 157, 159, 161, 163, 165, 167, 169, 171, 173, 175, 177, 179, 181, 183, 185, 187, 189, 191, 193, 195, 197, 199, 201, 203, 205, 207, 209, 211, 213, 215, 217, 219, 221, 223, 225, 227, 229, 231, 233, 235, 237, 239, 241, 243, 245, 247, 249, 251, 253, 255, 257, 259, 261, 263, 265, 267, 269, 271, 273, 275, 277, 279, 281, 283, 285, 287, 289, 291, 293, 295, 297, 299, 301, 303, 305, 307, 309, 311, 313, 315, 317, 319, 321, 323, 325, 327, 329, 331, 333, 335, 337, 339, 341, 343, 345, 347, 349, 351, 353, 355, 357, 359, 361, 363, 365, 367, 369, 371, 373, 375, 377, 379, 381, 383, 385, 387, 389, 391, 393, 395, 397, 399, 401, 403, 405, 407, 409, 411, 413, 415, 417, 419, 421, 423, 425, 427, 429, 431, 433, 435, 437, 439, 441, 443, 445, 447, 449, 451, 453, 455, 457, 459, 461, 463, 465, 467, 469, 471, 473, 475, 477, 479, 481 and 483, and/or at least one amino acid sequence selected from the group consisting of SEQ ID NOS: 1, 3, 5, 7, 9, 11, 13, 15, 17, 19, 21, 23, 25, 27, 29, 31, 33, 35, 37, 39, 41, 43, 45, 47, 49, 51, 53, 55, 57, 59, 61, 63, 65, 67, 70, 72, 74, 76, 78, 80, 82, 84, 86, 88, 90, 92, 94, 96, 98, 100, 102, 104, 106, 108, 110, 112, 114, 116, 118, 120, 122, 124, 126, 128, 130, 132, 134, 136, 138, 140, 142, 144, 146, 148, 150, 152, 154, 156, 158, 160, 162, 164, 166, 168, 170, 172, 174, 176, 178, 180, 182, 184, 186, 188, 190, 192, 194, 196, 198, 200, 202, 204, 206, 208, 210, 212, 214, 216, 218, 220, 222, 224, 226, 228, 230, 232, 234, 236, 238, 240, 242, 244, 246, 248, 250, 252, 254, 256, 258, 260, 262, 264, 266, 268, 270, 272, 274, 276, 278, 280, 282, 284, 286, 288, 290, 292, 294, 296, 298, 300, 302, 304, 306, 308, 310, 312, 314, 316, 318, 320, 322, 324, 326, 328, 330, 332, 334, 336, 338, 340, 342, 344, 346, 348, 350, 352, 354, 356, 358, 360, 362, 364, 366, 368, 370, 372, 374, 376, 378, 380, 382, 384, 386, 388, 390, 392, 394, 396, 398, 400, 402, 404, 406, 408, 410, 412, 414, 416, 418, 420, 422, 424, 426, 428, 430, 432, 434, 436, 438, 440, 442, 444, 446, 448, 450, 452, 454, 456, 458, 460, 462, 464, 466, 468, 470, 472, 474, 476, 478, 480, 482 and 484.

[0077] (30) A method for calculating identity to other nucleotide sequences and/or amino acid sequences, which comprises comparing data on a medium according to above item (29) with data of said other nucleotide sequences and/or amino acid sequences.

[0078] (31) An insoluble substrate to which polynucleotide comprising all or part of the nucleotide sequences selected from the group consisting of SEQ ID NOS: 2, 4, 6, 8, 10, 12, 14, 16, 18, 20, 22, 24, 26, 28, 30, 32, 34, 36, 38, 40, 42, 44, 46, 48, 50, 52, 54, 56, 58, 60, 62, 64, 66, 68, 69, 71, 73, 75, 77, 79, 81, 83, 85, 87, 89, 91, 93, 95, 97, 99, 101, 103, 105, 107, 109, 111, 113, 115, 117, 119, 121, 123, 125, 127, 129, 131, 133, 135, 137, 139, 141, 143, 145, 147, 149, 151, 153, 155, 157, 159, 161, 163, 165, 167, 169, 171, 173, 175, 177, 179, 181, 183, 185, 187, 189, 191, 193, 195, 197, 199, 201, 203, 205, 207, 209, 211, 213, 215, 217, 219, 221, 223, 225, 227, 229, 231, 233, 235, 237, 239, 241, 243, 245, 247, 249, 251, 253, 255, 257, 259, 261, 263, 265, 267, 269, 271, 273, 275, 277, 279, 281, 283, 285, 287, 289, 291, 293, 295, 297, 299, 301, 303, 305, 307, 309, 311, 313, 315, 317, 319, 321, 323, 325, 327, 329, 331, 333, 335, 337, 339, 341, 343, 345, 347, 349, 351, 353, 355, 357, 359, 361, 363, 365, 367, 369, 371, 373, 375, 377, 379, 381, 383, 385, 387, 389, 391, 393, 395, 397, 399, 401, 403, 405, 407, 409, 411, 413, 415, 417, 419, 421, 423, 425, 427, 429, 431, 433, 435, 437, 439, 441, 443, 445, 447, 449, 451, 453, 455, 457, 459, 461, 463, 465, 467, 469, 471, 473, 475, 477, 479, 481 and 483 are fixed.

[0079] (32) An insoluble substrate to which polypeptides comprising all or a part of the amino acid sequences selected from the group consisting of SEQ ID NOS: 1, 3, 5, 7, 9, 11, 13, 15, 17, 19, 21, 23, 25, 27, 29, 31, 33, 35, 37, 39, 41, 43, 45, 47, 49, 51, 53, 55, 57, 59, 61, 63, 65, 67, 70, 72, 74, 76, 78, 80, 82, 84, 86, 88, 90, 92, 94, 96, 98, 100, 102, 104, 106, 108, 110, 112, 114, 116, 118, 120, 122, 124, 126, 128, 130, 132, 134, 136, 138, 140, 142, 144, 146, 148, 150, 152, 154, 156, 158, 160, 162, 164, 166, 168, 170, 172, 174, 176, 178, 180, 182, 184, 186, 188, 190, 192, 194, 196, 198, 200, 202, 204, 206, 208, 210, 212, 214, 216, 218, 220, 222, 224, 226, 228, 230, 232, 234, 236, 238, 240, 242, 244, 246, 248, 250, 252, 254, 256, 258, 260, 262, 264, 266, 268, 270, 272, 274, 276, 278, 280, 282, 284, 286, 288, 290, 292, 294, 296, 298, 300, 302, 304, 306, 308, 310, 312, 314, 316, 318, 320, 322, 324, 326, 328, 330, 332, 334, 336, 338, 340, 342, 344, 346, 348, 350, 352, 354, 356, 358, 360, 362, 364, 366, 368, 370, 372, 374, 376, 378, 380, 382, 384, 386, 388, 390, 392, 394, 396, 398, 400, 402, 404, 406, 408, 410, 412, 414, 416, 418, 420, 422, 424, 426, 428, 430, 432, 434, 436, 438, 440, 442, 444, 446, 448, 450, 452, 454, 456, 458, 460, 462, 464, 466, 468, 470, 472, 474, 476, 478, 480, 482 and 484 are fixed.

[0080] The contents of the specifications and/or drawings of Japanese Patent Applications Nos. 2001-157043, 2001-260681 and 2001-313175, and U.S. Provisional Applications Nos. 60/293,172, 60/316,031 and 60/328,403, which form the bases of priority of the instant application, are incorporated herein.

### BRIEF DESCRIPTION OF THE DRAWINGS

[0081] FIG. 1 is a graph showing STAT6 reporter activity inhibition by a protein kinase inhibitor, AG18, AG490, or staurosporin in the case where a plasmid comprising a nucleotide encoding a protein represented by SEQ ID NO: 3 which acts to promote STAT6 activation is used. In the figure, the vertical axis shows relative luciferase activity.

[0082] FIG. 2 is a graph showing STAT6 reporter activity inhibition by a protein kinase inhibitor, AG18, AG490, or staurosporin in the case where a plasmid comprising a nucleotide encoding a protein represented by SEQ ID NO: 17 which acts to promote STAT6 activation is used. In the figure, the vertical axis shows relative luciferase activity.

[0083] FIG. 3 is a graph showing STAT6 reporter activity inhibition by a protein kinase inhibitor, AG18, AG490, or staurosporin in the case where a plasmid comprising a nucleotide encoding a protein represented by SEQ ID NO: 19 which acts to promote STAT6 activation is used. In the figure, the vertical axis shows relative luciferase activity.

[0084] FIG. 4 is a graph showing STAT6 reporter activity inhibition by a protein kinase inhibitor, AG18, AG490, or staurosporin in the case where a plasmid comprising a nucleotide encoding a protein represented by SEQ ID NO: 218 which acts to promote STAT6 activation is used. In the figure, the vertical axis shows relative luciferase activity.

[0085] FIG. 5 is a graph showing STAT6 reporter activity inhibition by a protein kinase inhibitor, AG18, AG490, or staurosporin in the case where a plasmid comprising a nucleotide encoding a protein represented by SEQ ID NO: 432 which acts to promote STAT6 activation is used. In the figure, the vertical axis shows relative luciferase activity.

[0086] FIG. 6 is a graph showing STAT6 reporter activity inhibition by a protein kinase inhibitor, AG18, AG490, or staurosporin in the case where a plasmid comprising a nucleotide encoding a protein represented by SEQ ID NO: 472 which acts to promote STAT6 activation is used. In the figure, the vertical axis shows relative luciferase activity.

[0087] FIG. 7 is a graph showing STAT6 reporter activity inhibition by a protein kinase inhibitor, AG18, AG490, or staurosporin in the case where a plasmid comprising a nucleotide represented by SEQ ID NO: 64 is used. In the figure, the vertical axis shows relative luciferase activity.

### EXPLANATION OF THE SEQUENCE LISTING

[0088] SEQ ID NO: 485, SEQ ID NO: 486, SEQ ID NO: 487 and SEQ ID NO: 488 are primers.

### BEST MODE FOR CARRYING OUT THE INVENTION

[0089] At first, in order to further clarify the basic feature of the present invention, the present invention is explained by following how the present invention is completed. In order to obtain a new gene having a function of promoting STAT6 activation, the following experiments were carried out as shown in the examples. First, using the oligo-capping method, a full-length cDNA was produced from mRNA prepared from normal human lung fibroblasts (purchased from Sanko Junyaku Co., Ltd.), and a full-length cDNA library was constructed in which the cDNA was inserted into the vector pME18S-FL3 (GenBank Accession AB009864). Next, the cDNA library was introduced into E. coli cells, and plasmid preparation was carried out per clone. Then, a reporter plasmid containing a STAT6 response sequence upstream of DNA encoding luciferase (e.g., J. Biol. Chem. 275. 26500-26506 (2000), J. Exp. Med. 190, 1837-1848 (1999), J. Immunol. 150, 5408-5417 (1993), J. Immunol. 157, 2058-2065 (1996)) and the above full-length cDNA plasmid were cotransfected into NIH3T3 cells (Dainippon Pharmaceutical). After 48 hours of culture followed by slightly weak stimulation with mouse IL-4, luciferase activity was measured at a time of 6 hours thereafter, and the plasmid with significantly increased luciferase activity compared to that of a control experiment (vector pME18S-FL3 is introduced into a cell in place of a full-length cDNA) was selected (the selected plasmid showed a 3-fold or more increase in luciferase activity compared to that of the control experiment), and the entire nucleotide sequence of the cDNA cloned into the plasmid was determined. The protein encoded by the cDNA thus obtained shows that this protein is a signal transduction molecule involved in promotion of STAT6 activation.

[0090] The present invention is described in detail below.

[0091] In the present invention, the phrase “promote(s) STAT6 activation” means that direct or indirect activation of STAT6 (including induction of STAT6 activation) occurs when a gene is introduced into a suitable cell and the protein encoded by the gene is excessively expressed, without physiological stimuli; and/or that further direct or indirect promotion (including induction of promotion of STAT6 activation) of normal levels of STAT6 activation occurs, in the case where after the gene is introduced into a suitable cell and the protein encoded by the gene is excessively expressed, a physiological stimulus is introduced to the cell. Activation of STAT6 can be measured, for example, by an assay using an STAT6 dependant reporter gene. In the assay, activation can be detected by an increase in reporter activity compared to control cells (cells into which the reporter gene and a null vector were introduced). Increase in reporter activity is preferably by a factor of 1.5 or more, more preferably by a factor of 3 or more, and still more preferably by a factor of 6 or more.

[0092] Reporter activity can be measured by cloning a polynucleotide (e.g. cDNA) encoding the protein to be expressed into a suitable expression vector, co-transfecting the expression vector and a STAT6 dependant reporter plasmid into a suitable cell, and after culturing for a certain period, then measuring reporter activity. Or, after co-transfecting and culturing for a certain period, adding a stimulant, further culturing, then measuring reporter activity. Suitable expression vectors are well known to those skilled in the art, examples of which include pME18S-FL3, pcDNA3.1 (Invitrogen). The reporter gene can be one which enables a person skilled in the art to easily detect the expression thereof, and examples include a gene encoding luciferase, chloramphenicol acetyl transferase, or β-galactosidase. Use of a gene encoding luciferase is most preferable, and examples of an STAT6 dependent reporter plasmid include luciferase reporter plasmid N4×8-luc which has a STAT6 response sequence. Suitable cells include cells which exhibit an STAT6 activation response to stimulation by IL-4, IL-13 and the like. Examples include NIH3T3 cells. Cell culture and introduction of genes into cells (transfection) can be performed and optimized by a person skilled in the art by known techniques.

[0093] As a preferable method, NIH3T3 cells are inoculated on 10% FBS (Fetal Bovine Serum)-containing IMDM medium in a 96-well cell culture plate to a final cell density of 1×10⁴ cells/well, and cultured for 24 hours at 37° C., in the presence of 5% CO₂. Then, the luciferase reporter plasmid N4×8-luc which has a STAT6 response sequence, and the expression vector are cotransfected into the cells in a well using FuGENE 6 (Roche). After 48 hours of culture at 37° C., in the presence of 5% CO₂ mouse IL-4 (Immuno Biological Laboratories Co., Ltd.) is added to a final concentration of 0.5 ng/ml. After culturing for further 6 hours, promoting activity for STAT6 activation is then measured by measuring luciferase activity using a long term luciferase assay system, Picagene LT2.0 (Toyo Ink Mfg). For example, luciferase activity can be measured using PerkinElmer's Wallac ARVOTMST 1420 MULTILABEL COUNTER. The method for gene introduction by FuGENE6, and measurement of luciferase activity by Picagene LT2.0 can be performed respectively according to the attached protocols. In a method of gene introduction with a 96-well plate using FuGENE6, the amount of FuGENE6 per 1 well is suitably 0.3 to 0.5 μl, preferably 0.3 μl; the amount of N4×8-luc reporter plasmid is suitably 50 to 100 ng, preferably 100 ng; and the amount of expression vector is suitably 50 to 100 ng, preferably 100 ng. An ability (action) to promote STAT6 activation refers to an ability to increase the reporter activity (luciferase activity) relative to the control experiment (for cells into which the reporter gene and a null vector were introduced). Increase in reporter activity is preferably by a factor of 1.5 or more, more preferably by a factor of 3 or more, and still more preferably by a factor of 6 or more.

[0094] Related to the amino acid sequences of 1, 3, 5, 7, 9, 11, 13, 15, 17, 19, 21, 23, 25, 27, 29, 31, 33, 35, 37, 39, 41, 43, 45, 47, 49, 51, 53, 55, 57, 59, 61, 63, 65, 67, 70, 72, 74, 76, 78, 80, 82, 84, 86, 88, 90, 92, 94, 96, 98, 100, 102, 104, 106, 108, 110, 112, 114, 116, 118, 120, 122, 124, 126, 128, 130, 132, 134, 136, 138, 140, 142, 144, 146, 148, 150, 152, 154, 156, 158, 160, 162, 164, 166, 168, 170, 172, 174, 176, 178, 180, 182, 184, 186, 188, 190, 192, 194, 196, 198, 200, 202, 204, 206, 208, 210, 212, 214, 216, 218, 220, 222, 224, 226, 228, 230, 232, 234, 236, 238, 240, 242, 244, 246, 248, 250, 252, 254, 256, 258, 260, 262, 264, 266, 268, 270, 272, 274, 276, 278, 280, 282, 284, 286, 288, 290, 292, 294, 296, 298, 300, 302, 304, 306, 308, 310, 312, 314, 316, 318, 320, 322, 324, 326, 328, 330, 332, 334, 336, 338, 340, 342, 344, 346, 348, 350, 352, 354, 356, 358, 360, 362, 364, 366, 368, 370, 372, 374, 376, 378, 380, 382, 384, 386, 388, 390, 392, 394, 396, 398, 400, 402, 404, 406, 408, 410, 412, 414, 416, 418, 420, 422, 424, 426, 428, 430, 432, 434, 436, 438, 440, 442, 444, 446, 448, 450, 452, 454, 456, 458, 460, 462, 464, 466, 468, 470. 472, 474, 476, 478, 480, 482 and 484 (hereinafter, sometimes referred to as amino acid sequences represented by SEQ ID NO: 1, etc), the present invention provides for a protein that:

[0095] (a) comprises the above amino acid sequences;

[0096] (b) is a polypeptide having one of the above amino acid sequences;

[0097] (c) promotes STAT6 activation and consists of an amino acid sequence having at least one amino acid deletion, substitution or addition in the above amino acid sequences:

[0098] (d) promotes STAT6 activation and comprises an amino acid sequence, which has at least 95% identity, preferably at least 97-99% identity, to the above amino acid sequences over the entire length thereof:

[0099] “Identity” as known in the art, is a relationship between two or more protein sequence or two or more polynucleotide sequences, as determined by comparing the sequences. In the art, “identity” also means the degree of sequence relatedness between protein or polynucleotide sequences, as determined by the match between protein or polynucleotide sequences, as the case may be, as determined by the match between strings of such sequences. “Identity” and “similarity” can be readily calculated by known methods. Preferred methods to determine identity are designed to give the largest match between the sequences tested. Methods to determine identity and similarity are codified in publicly available computer programs. “Identity” can be determined by using, for example, the BLAST program (for example, Altschul S F, Gish W, Miller W, Myers E W, Lipman D J., J. Mol. Biol., 215:p403-410(1990), Altschul S F, Madden T L, Schaffer A A, Zhang Z, Miller W, Lipman D J,. Nucleic Acids Res. 25:p3389-3402 81997)), however methods of determining identity are not limited to this. Where software such as BLAST is used, it is preferable to use default values.

[0100] The main initial conditions generally used in a BLAST search are as follows, but are not limited to these. An amino acid substitution matrix is a matrix numerically representing the degree of analogy of each pairing of each of the 20 types of amino acid, and normally the default matrix, BLOSUM62, is used. The theory of this amino acids substitution matrix is shown in Altschul S. F., J. Mol. Biol. 219: 555-565 (1991), and its applicability to DNA sequence comparison is shown in States D. J., Gish W., Altschul S. F., Methods, 3: 66-70 (1991). In this case, optimal gap cost is determined empirically and in the case of BLOSUM62, preferably parameters, Existence 11, Extension 1 are used.

[0101] The expected value (EXPECT) is the threshold value concerning statistical significance for a match with a database sequence, and the default value is 10.

[0102] As one example, a protein having, for example, 95% or more sequence identity to the amino acid sequence of SEQ ID NO: 1 may have an amino acid sequence that includes up to 5 amino acid changes per 100 amino acids of the amino acid sequence of SEQ ID NO: 1. In other words, a protein having 95% or more amino acid sequence identity to a subject amino acid sequence, may have amino acids up to 5% of the total number of amino acids within the subject sequence, deleted or substituted by other amino acids, or amino acids up to 5% of the total number of amino acids within the subject sequence may be inserted within the subject sequence. These changes within the subject sequence, may exist at the amino terminus or the carboxy terminus of the subject sequence, or may exist at any position between these termini, or may form one or more groups of changes.

[0103] The Examples described below demonstrate that the protein consisting of an amino acid sequence of the above SEQ ID NOS: 1, etc., is capable of promoting STAT6 activation.

[0104] Related to the polynucleotide sequences of SEQ ID NOs: 2, 4, 6, 8, 10, 12, 14, 16, 18, 20, 22, 24, 26, 28, 30, 32, 34, 36, 38, 40, 42, 44, 46, 48, 50, 52, 54, 56, 58, 60, 62, 64, 66, 68, 69, 71, 73, 75, 77, 79, 81, 83, 85, 87, 89, 91, 93, 95, 97, 99, 101, 103, 105, 107, 109, 111, 113, 115, 117, 119, 121, 123, 125, 127, 129, 131, 133, 135, 137, 139, 141, 143, 145, 147, 149, 151, 153, 155, 157, 159, 161, 163, 165, 167, 169, 171, 173, 175, 177, 179, 181, 183, 185, 187, 189, 191, 193, 195, 197, 199, 201, 203, 205, 207, 209, 211, 213, 215, 217, 219, 221, 223, 225, 227, 229, 231, 233, 235, 237, 239, 241, 243, 245, 247, 249, 251, 253, 255, 257, 259, 261, 263, 265, 267, 269, 271, 273, 275, 277, 279, 281, 283, 285, 287, 289, 291, 293, 295, 297, 299, 301, 303, 305, 307, 309, 311, 313, 315, 317, 319, 321, 323, 325, 327, 329, 331, 333, 335, 337, 339, 341, 343, 345, 347, 349, 351, 353, 355, 357, 359, 361, 363, 365, 367, 369, 371, 373, 375, 377, 379, 381, 383, 385, 387, 389, 391, 393, 395, 397, 399, 401, 403, 405, 407, 409, 411, 413, 415, 417, 419, 421, 423, 425, 427, 429, 431, 433, 435, 437, 439, 441, 443, 445, 447, 449, 451, 453, 455, 457, 459; 461, 463, 465, 467, 469, 471, 473, 475, 477, 479, 481 and 483 (hereinafter, sometimes referred to SEQ ID NO: 2, etc), the present invention further provides an isolated polynucleotide that is:

[0105] (a) a polynucleotide of any of the above sequences;

[0106] (b) a polynucleotide comprising a polynucleotide sequence, which has at least 95% identity, preferably 97-99% identity, to any of the above sequences, and which encodes a protein which acts to promote STAT6 activation;

[0107] (c) a polynucleotide which has a nucleotide sequence that encodes a protein, wherein the protein has an amino acid sequence having at least 95% identity, preferably at least 97-99% identity, to the amino acid sequence of SEQ ID NO: 1, 3, 5, 7, 9, 11, 13, 15, 17, 19, 21, 23, 25, 27, 29, 31, 33, 35, 37, 39, 41, 43, 45, 47, 49, 51, 53, 55, 57, 59, 61, 63, 65, 67, 70, 72, 74, 76, 78, 80, 82, 84, 86, 88, 90, 92, 94, 96, 98, 100, 102, 104, 106, 108, 110, 112, 114, 116, 118, 120, 122, 124, 126, 128, 130, 132, 134, 136, 138, 140, 142, 144, 146, 148, 150, 152, 154, 156, 158, 160, 162, 164, 166, 168, 170, 172, 174, 176, 178, 180, 182, 184, 186, 188, 190, 192, 194, 196, 198, 200, 202, 204, 206, 208, 210, 212, 214, 216, 218, 220, 222, 224, 226, 228, 230, 232, 234, 236, 238, 240, 242, 244, 246, 248, 250, 252, 254, 256, 258, 260, 262, 264, 266, 268, 270, 272, 274, 276, 278, 280, 282, 284, 286, 288, 290, 292, 294, 296, 298, 300, 302, 304, 306, 308, 310, 312, 314, 316, 318, 320, 322, 324, 326, 328, 330, 332, 334, 336, 338, 340, 342, 344, 346, 348, 350, 352, 354, 356, 358, 360, 362, 364, 366, 368, 370, 372, 374, 376, 378, 380, 382, 384, 386, 388, 390, 392, 394, 396, 398, 400, 402, 404, 406, 408, 410, 412, 414, 416, 418, 420, 422, 424, 426, 428, 430, 432, 434, 436, 438, 440, 442, 444, 446, 448, 450, 452, 454, 456, 458, 460, 462, 464, 466, 468, 470, 472, 474, 476, 478, 480, 482 or 484 and acts to promote STAT6 activation.

[0108] Polynucleotides which are identical or sufficiently identical to a nucleotide sequence contained in the above nucleotide sequence may be used as hybridization probes to isolate full-length cDNA or genomic clones encoding proteins of the present invention or cDNA and genomic clones of other genes that have a high sequence similarity to the above sequences, or as primers for a nucleic acid amplification reactions. Typically, these nucleotide sequences are 70% identical, preferably 80% identical, more preferably 90% identical, most preferably 95% identical to the above sequences. The probes or primers will generally comprises at least 15 nucleotides, preferably 30 nucleotides and may have 50 nucleotides. Particularly preferred probes will have between 30 and 50 nucleotides. Particularly preferred primers have between 20 and 25 nucleotides.

[0109] The polynucleotide of the present invention may be either in the form of a DNA such as cDNA , a genomic DNA obtained by cloning or synthetically produced, or may be in the form of RNA such as mRNA. The polynucleotide may be single-stranded or double-stranded. The double-stranded polynucleotides may be double-stranded DNA, double-stranded RNA or DNA:RNA hybrid. The single-stranded polynucleotide may be sense strand also known as coding strand or antisense strand also known as non-coding strand.

[0110] Those skilled in the art can prepare a protein having the same activity that promotes STAT6 activation as the protein having an amino acid sequence represented by SEQ ID NO: 1, etc by means of appropriate substitution of an amino acid in the protein using known methods. One such method involves using conventional mutagenesis procedures for the DNA encoding the protein. Another method is, for example, site-directed mutagenesis (e.g., Mutan-Super Express Km Kit from Takara Shuzo Co., Ltd.). Mutations of amino acids in proteins may also occur in nature. Thus, the present invention also includes a mutated protein which is capable of promoting STAT6 activation and which has at least one amino acid deletion, substitution or addition compared to the protein having an amino acid sequence represented by SEQ ID NO: 1, etc. The number of mutations is preferably up to 10, more preferably up to 5, most preferably up to 3.

[0111] The substitutions of amino acids are preferably conservative substitutions, specific examples of which are substitutions within the following groups: (glycine, alanine), (valine, isoleucine, leucine), (aspartic acid, glutamic acid), (asparagine, glutamine), (serine, threonine), (lysine, arginine) and (phenylalanine, tyrosine).

[0112] Based on the nucleotide sequences (e.g., a polynucleotide of SEQ ID NO: 2, etc) encoding a protein consisting of an amino acid sequence of SEQ ID NOS: 1, 3, 5, 7, 9, 11, 13, 15, 17, 19, 21, 23, 25, 27, 29, 31, 33, 35, 37, 39, 41, 43, 45, 47, 49, 51, 53, 55, 57, 59, 61, 63, 65, 67, 70, 72, 74, 76, 78, 80, 82, 84, 86, 88, 90, 92, 94, 96, 98, 100, 102, 104, 106, 108, 110, 112, 114, 116, 118, 120, 122, 124, 126, 128, 130, 132, 134, 136, 138, 140, 142, 144, 146, 148, 150, 152, 154, 156, 158, 160, 162, 164, 166, 168, 170, 172, 174, 176, 178, 180, 182, 184, 186, 188, 190, 192, 194, 196, 198, 200, 202, 204, 206, 208, 210, 212, 214, 216, 218, 220, 222, 224, 226, 228, 230, 232, 234, 236, 238, 240, 242, 244, 246, 248, 250, 252, 254, 256, 258, 260, 262, 264, 266, 268, 270, 272, 274, 276, 278, 280, 282, 284, 286, 288, 290, 292, 294, 296, 298, 300, 302, 304, 306, 308, 310, 312, 314, 316, 318, 320, 322, 324, 326, 328, 330, 332, 334, 336, 338, 340, 342, 344, 346, 348, 350, 352, 354, 356, 358, 360, 362, 364, 366, 368, 370, 372, 374, 376, 378, 380, 382, 384, 386, 388, 390, 392, 394, 396, 398, 400, 402, 404, 406, 408, 410, 412, 414, 416, 418, 420, 422, 424, 426, 428, 430, 432, 434, 436, 438, 440, 442, 444, 446, 448, 450, 452, 454, 456, 458, 460, 462, 464, 466, 468, 470, 472, 474, 476, 478, 480, 482 or 484 or fragments thereof, those skilled in the art can routinely isolate a DNA with a high sequence similarity to these nucleotide sequences by using hybridization techniques and the like, and obtain proteins having the same activity that promotes STAT activation as the protein having of an amino acid sequence of SEQ ID NO: 1, etc. Thus, the present invention also includes a protein that promotes STAT6 activation and comprises an amino acid sequence having a high identity to the amino acid sequence of above SEQ ID NO: 1, etc. “High identity” refers to an amino acid sequence having an identity of at least 90%, preferably at least 97-99% over the entire length of an amino acid sequence represented by above SEQ ID NO: 1, etc.

[0113] The proteins of the present invention may be natural proteins derived from any human or animal cells or tissues, chemically synthesized proteins, or proteins obtained by genetic recombination techniques. The protein may or may not be subjected to post-translational modifications such as sugar chain addition or phosphorylation.

[0114] Examples of the protein of the present invention includes secretory proteins (growth factors, cytokines, hormones, etc.), protein modifying enzymes (protein phosphorylases, protein dephosphorylases, proteases, etc), intranuclear proteins (intranuclear receptors, transcription factors) and membrane proteins. Membrane proteins include receptors, cellular adhesion molecules, ion channels, transporters, etc. Where the protein is a membrane protein, a compound selected by the below-described screening is more useful as a medical compound research tool since it is expected to easily migrate into a cell.

[0115] The present invention also includes a polynucleotide encoding the above protein of the present invention. Examples of nucleotide sequences encoding a protein consisting of an amino acid sequence of SEQ ID NOS: 1, 3, 5, 7, 9, 11, 13, 15, 17, 19, 21, 23, 25, 27, 29, 31, 33, 35, 37, 39, 41, 43, 45, 47, 49, 51, 53, 55, 57, 59, 61, 63, 65, 67, 70, 72, 74, 76, 78, 80, 82, 84, 86, 88, 90, 92, 94, 96, 98, 100, 102, 104, 106, 108, 110, 112, 114, 116, 118, 120, 122, 124, 126, 128, 130, 132, 134, 136, 138, 140, 142, 144, 146, 148, 150, 152, 154, 156, 158, 160, 162, 164, 166, 168, 170, 172, 174, 176, 178, 180, 182, 184, 186, 188, 190, 192, 194, 196, 198, 200, 202, 204, 206, 208, 210, 212, 214, 216, 218, 220, 222, 224, 226, 228, 230, 232, 234, 236, 238, 240, 242, 244, 246, 248, 250, 252, 254, 256, 258, 260, 262, 264, 266, 268, 270, 272, 274, 276, 278, 280, 282, 284, 286, 288, 290, 292, 294, 296, 298, 300, 302, 304, 306, 308, 310, 312, 314, 316, 318, 320, 322, 324, 326, 328, 330, 332, 334, 336, 338, 340, 342, 344, 346, 348, 350, 352, 354, 356, 358, 360, 362, 364, 366, 368, 370, 372, 374, 376, 378, 380, 382, 384, 386, 388, 390, 392, 394, 396, 398, 400, 402, 404, 406, 408, 410, 412, 414, 416, 418, 420, 422, 424, 426, 428, 430, 432, 434, 436, 438, 440, 442, 444, 446, 448, 450, 452, 454, 456, 458, 460, 462, 464, 466, 468, 470, 472, 474, 476, 478, 480, 482 and 484 include nucleotide sequences of SEQ ID NOS: 2, 4, 6, 8, 10, 12, 14, 16, 18, 20, 22, 24, 26, 28, 30, 32, 34, 36, 38, 40, 42, 44, 46, 48, 50, 52, 54, 56, 58, 60, 62, 64, 66, 68, 69, 71, 73, 75, 77, 79, 81, 83, 85, 87, 89, 91, 93, 95, 97, 99, 101, 103, 105, 107, 109, 111, 113, 115, 117, 119, 121, 123, 125, 127, 129, 131, 133, 135, 137, 139, 141, 143, 145, 147, 149, 151, 153, 155, 157, 159, 161, 163, 165, 167, 169, 171, 173, 175, 177, 179, 181, 183, 185, 187, 189, 191, 193, 195, 197, 199, 201, 203, 205, 207, 209, 211, 213, 215, 217, 219, 221, 223, 225, 227, 229, 231, 233, 235, 237, 239, 241, 243, 245, 247, 249, 251, 253, 255, 257, 259, 261, 263, 265, 267, 269, 271, 273, 275, 277, 279, 281, 283, 285, 287, 289, 291, 293, 295, 297, 299, 301, 303, 305, 307, 309, 311, 313, 315, 317, 319, 321, 323, 325, 327, 329, 331, 333, 335, 337, 339, 341, 343, 345, 347, 349, 351, 353, 355, 357, 359, 361, 363, 365, 367, 369, 371, 373, 375, 377, 379, 381, 383, 385, 387, 389, 391, 393, 395, 397, 399, 401, 403, 405, 407, 409, 411, 413, 415, 417, 419, 421, 423, 425, 427, 429, 431, 433, 435, 437, 439, 441, 443, 445, 447, 449, 451, 453, 455, 457, 459, 461, 463, 465, 467, 469, 471, 473, 475, 477, 479, 481 and 483. The DNA includes cDNA, genomic DNA, and chemically synthesized DNA. In accordance with the degeneracy of the genetic code, at least one nucleotide in the nucleotide sequence encoding a protein consisting of an amino acid sequence of SEQ ID NOS: 1, 3, 5, 7, 9, 11, 13, 15, 17, 19 21, 23, 25, 27, 29, 31, 33, 35, 37, 39, 41, 43, 45, 47, 49, 51, 53, 55, 57, 59, 61, 63, 65, 67, 70, 72, 74, 76, 78, 80, 82, 84, 86, 88, 90, 92, 94, 96, 98, 100, 102, 104, 106, 108, 110, 112, 114, 116, 118, 120, 122, 124, 126, 128, 130, 132, 134, 136, 138, 140, 142, 144, 146, 148, 150, 152, 154, 156, 158, 160, 162, 164, 166, 168, 170, 172, 174, 176, 178, 180, 182, 184, 186, 188, 190, 192, 194, 196, 198, 200, 202, 204, 206, 208, 210, 212, 214, 216, 218, 220, 222, 224, 226, 228, 230, 232, 234, 236, 238, 240, 242, 244, 246, 248, 250, 252, 254, 256, 258, 260, 262, 264, 266, 268, 270, 272, 274, 276, 278, 280, 282, 284, 286, 288, 290, 292, 294, 296, 298, 300, 302, 304, 306, 308, 310, 312, 314, 316, 318, 320, 322, 324, 326, 328, 330, 332, 334, 336, 338, 340, 342, 344, 346, 348, 350, 352, 354, 356, 358, 360, 362, 364, 366, 368, 370, 372, 374, 376, 378, 380, 382, 384, 386, 388, 390, 392, 394, 396, 398, 400, 402, 404, 406, 408, 410, 412, 414, 416, 418, 420, 422, 424, 426, 428, 430, 432, 434, 436, 438, 440, 442, 444, 446, 448, 450, 452, 454, 456, 458, 460 462, 464, 466, 468, 470, 472, 474, 476, 478, 480, 482 and 484 can be substituted with other nucleotides without altering the amino acid sequence of the protein produced from the gene. Therefore, the DNA sequences of the present invention also include nucleotide sequences altered by substitution based on the degeneracy of the genetic code. Such DNA sequences can be synthesized using known methods.

[0116] The DNA of the present invention includes a DNA which encodes a protein capable of promoting STAT6 activation and hybridizes under stringent conditions with the DNA sequence of the above nucleotide sequence of SEQ ID NO: 2, etc. Stringent conditions are apparent to those skilled in the art, and can be easily attained in accordance with various laboratory manuals such as T. Maniatis et al., Molecular Cloning A Laboratory Manual, and Cold Spring Harbor Laboratory 1982, 1989.

[0117] That is, “stringent conditions” refer to overnight incubation at 37° C. in a hybridization solution containing 30% formamide, 5×SSC (0.75 M NaCl, 75mM trisodium citrate), 5×Denhardt's solution, 0.5% SDS, 100 μg/ml denatured, sheared salmon sperm DNA) followed by washing (three times) in 2×SSC, 0.1% SDS for 10 minutes at room temperature, then followed by washing (two times) in 0.2×SSC, 0.1% SDS for 10 minutes at 37° C.(low stringency). Preferred stringent conditions are overnight incubation at 42 ° C. in a hybridization solution containing 40% formamide, followed by washing (three times) in 2×SSC, 0.1% SDS for 10 minutes at room temperature, then followed by washing (two times) in 0.2×SSC, 0.1% SDS for 10 minutes at 42° C.(moderate stringency). More preferred stringent conditions are overnight incubation at 42° C. in a hybridization solution containing 50% formamide, followed by washing (three times) in 2×SSC, 0.1% SDS for 10 minutes at room temperature, followed by washing (two times) in 0.2×SSC, 0.1% SDS for 10 minutes at 50° C. (high stringency). The DNA sequence thus obtained must encode a protein capable of promoting STAT6 activation.

[0118] The present invention also includes a polynucleotide comprising a nucleotide sequence which encodes a protein capable of promoting STAT6 activation and has a high sequence similarity to the nucleotide sequence of the polynucleotide according to above item (3) or (4). Typically these nucleotide sequence are 95% identical, preferably 97% identical, most preferably at least 99% identical to the nucleotide sequence of the polynucleotide according to above item (3) or (4) over the entire length thereof.

[0119] The above nucleotide sequence of the present invention can be used to produce the above protein using recombinant DNA techniques. In general, the DNA and peptide of the present invention can be obtained by:

[0120] (A) cloning the DNA encoding the protein of the present invention;

[0121] (B) inserting the DNA encoding the entire coding region of the protein or a part thereof into an expression vector to construct a recombinant vector;

[0122] (C) transforming host cells with the recombinant vector thus constructed; and

[0123] (D) culturing the obtained cells to express the protein or its analogue, and then purifying it by column chromatography.

[0124] General procedures necessary to handle DNA and recombinant host cells (e.g., E. coli) in the above steps are well known to those skilled in the art, and can be easily carried out in accordance with various laboratory manuals such as T. Maniatis et al., supra. All the enzymes, reagents, etc., used in these procedures are commercially available, and unless otherwise stated, such commercially available products can be used according to the use conditions specified by the manufactures' instructions to attain completely its objects. The above steps (A) to (D) can be further illustrated in more details as follows.

[0125] Techniques for cloning the DNA encoding the protein of the present invention include, in addition to the methods described in the specification of the present application, PCR amplification using a synthetic DNA having a portion of the nucleotide sequence of the present invention (e.g., SEQ ID NO: 2, etc), as a primer, and selection of the DNA inserted into a suitable vector by hybridization with a labeled DNA fragment encoding a partial or full coding region of the protein of the present invention or a labeled synthetic DNA. Another technique involves direct amplification from total RNAs or mRNA fractions prepared from cells or tissues, using the reverse transcriptase polymerase chain reaction (RT-PCR method). As a DNA inserted into a suitable vector, for example, a commercially available library (e.g., from CLONTECH and STRATAGENE) can be used. Techniques for hybridization are normally used in the art, and can be easily carried out in accordance with various laboratory manuals such as T. Maniatis et al., supra. Depending on the intended purpose, the cloned DNA encoding the protein of the present invention can be used as such or if desired after digestion with a restriction enzyme or addition of a linker. The DNA thus obtained may have a nucleotide sequence of SEQ ID NOS: 2, 4, 6, 8, 10, 12, 14, 16, 18, 20, 22, 24, 26, 28, 30, 32, 34, 36, 38, 40, 42, 44, 46, 48, 50, 52, 54, 56, 58, 60, 62, 64, 66, 68, 69, 71, 73, 75, 77, 79, 81, 83, 85, 87, 89, 91, 93, 95, 97, 99, 101, 103, 105, 107, 109, 111, 113, 115, 117, 119, 121, 123, 125, 127, 129, 131, 133, 135, 137, 139, 141, 143, 145, 147, 149, 151, 153, 155, 157, 159, 161, 163, 165, 167, 169, 171, 173, 175, 177, 179, 181, 183, 185, 187, 189, 191, 193, 195, 197, 199, 201, 203, 205, 207, 209, 211, 213, 215, 217, 219, 221, 223, 225, 227, 229, 231, 233, 235, 237, 239, 241, 243, 245, 247, 249, 251, 253, 255, 257, 259, 261, 263, 265, 267, 269, 271, 273, 275, 277, 279, 281, 283, 285, 287, 289, 291, 293, 295, 297, 299, 301, 303, 305, 307, 309, 311, 313, 315, 317, 319, 321, 323, 325, 327, 329, 331, 333, 335, 337, 339, 341, 343, 345, 347, 349, 351, 353, 355, 357, 359, 361, 363, 365, 367, 369, 371, 373, 375, 377, 379, 381, 383, 385, 387, 389, 391, 393, 395, 397, 399, 401, 403, 405, 407, 409, 411, 413, 415, 417, 419, 421, 423, 425, 427, 429, 431, 433, 435, 437, 439, 441, 443, 445, 447, 449, 451, 453, 455, 457, 459, 461, 463, 465, 467, 469, 471, 473, 475, 477, 479, 481 or 483 or a polynucleotide of above items (3) to (6). The DNA sequence to be inserted into an expression vector in the above step (B) may be a full-length cDNA or a DNA fragment encoding the above full-length protein, or a DNA fragment constructed so that it expresses a part thereof.

[0126] Thus, the present invention also includes a recombinant vector, which comprises the above DNA sequence. The expression vector for the protein of the present invention can be produced, for example, by excising the desired DNA fragment from the DNA encoding the protein of the present invention, and ligating the DNA fragment downstream of a promoter in a suitable expression vector.

[0127] Expression vectors for use in the present invention may be any vectors derived from prokaryotes (e.g., E. coli), yeast, fungi, insect viruses and vertebrate viruses so long as such vectors are replicable. However, the vectors should be selected to be compatible with microorganisms or cells used as hosts. Suitable combinations of host cell—expression vector systems are selected depending on the desired expression product.

[0128] When bacteria are used as hosts, plasmid vectors compatible with these bacteria are generally used as replicable expression vectors for recombinant DNA molecules.

[0129] For example, the plasmids pBR322 and pBR327can be used to transform E. coli. Plasmid vectors normally contain an origin of replication, a promoter, and a marker gene conferring upon a recombinant DNA a phenotype useful for selecting the cells transformed with the recombinant DNA. Example of such promoters include a β-lactamase promoter, lactose promoter and tryptophan promoter. Examples of such marker genes include an ampicillin resistance gene, and a tetracycline resistance gene. Examples of suitable expression vectors include the plasmids pUC18 and pUC19 in addition to pBR322, pBR327.

[0130] In order to express the DNA of the present invention in yeast, for example, YEp24 can be used as a replicable vector. The plasmid YEp24 contains the URA3 gene, which can be employed as a marker gene. Examples of promoters in expression vectors for yeast cells include promoters derived from genes for 3-phosphoglycerate kinase, glyceraldehyde-3-phosphate dehydrogenase and alcohol dehydrogenase.

[0131] Examples of promoters and terminators for use in expression vectors to express the DNA of the present invention in fungal cells include promoters and terminators derived from genes for phosphoglycerate kinase (PGK), glyceraldehyde-3-phosphate dehydrogenase (GAPD) and actin. Examples of suitable expression vectors include the plasmids pPGACY2 and pBSFAHY83.

[0132] Examples of promoters for use in expression vectors to express the DNA of the present invention in insect cells include a polyhedrin promoter and P10 promoter.

[0133] Recombinant vectors used to express the DNA of the present invention in animal cells normally contain functional sequences to regulate genes, such as an origin of replication, a promoter to be placed upstream of the DNA of the present invention, a ribosome-binding site, a polyadenylation site and a transcription termination sequence. Such functional sequences, which can be used to express the DNA of the present invention in eukaryotic cells, can be obtained from viruses and viral substances. Examples of such functional sequences include an SRα promoter, SV40 promoter, LTR promoter, CMV (cytomegalovirus) promoter and HSV-TK promoter. Among them, a CMV promoter and SR α promoter can be preferably used. As promoters to be placed inherently upstream of the gene encoding the protein of the present invention, any promoters can be used so long as they are suitable for use in the above host-vector systems. Examples of origins of replication include foreign origins of replication, for example, those derived from viruses such as adenovirus, polyoma virus and SV40 virus. When vectors capable of integration into host chromosomes are used as expression vectors, origins of replication of the host chromosomes may be employed. Examples of suitable expression vectors include the plasmids pSV2-dhfr (ATCC 37146), pBPV-1(9-1) (ATCC 37111), pcDNA3.1 (INVITROGEN) and pME18S-FL3.

[0134] The present invention also includes a transformed cell, which comprises the above recombinant vector.

[0135] Microorganisms or cells transformed with the replicable recombinant vector of the present invention can be selected from remaining untransformed parent cells based on at least one phenotype conferred by the recombinant vector. Phenotypes can be conferred by inserting at least one marker gene into the recombinant vector. Marker genes naturally contained in replicable vectors can be employed. Examples of marker genes include drug resistance genes such as neomycin resistance genes, and genes encoding dihydrofolate reductase.

[0136] As hosts for use in the above step (C), any of prokaryotes (e.g., E. coli), microorganisms (e.g., yeast and fungi) as well as insect and animal cells can be used so long as such hosts are compatible with the expression vectors used. Examples of such microorganisms include Escherichia coli strains such as E. coli K12 strain 294 (ATCC 31446), E. coli X1776 (ATCC 31537), E. coli C600, E. coli JM109 and E. coli B strain; bacterial strains belonging to the genus Bacillus such as Bacillus subtilis; intestinal bacteria other than E. coli, such as Salmonella typhimurium or Serratia marcescens; and various strains belonging to the genus Pseudomonas. Examples of such yeast include Saccharomyces cerevisiae, Schizosaccharomyces pombe, and Pichia pastoris. Examples of such fungi include Aspergillus nidulans, and Acremonium chrysogenum (ATCC 11550).

[0137] As insect cells, for example, Spodoptera frugiperda (Sf cells), High Five™ cells derived from eggs of Trichoplusiani, etc., can be used when the virus is AcNPV. Examples of such animal cells include HEK 293 cells, COS-1 cells, COS-7 cells, Hela cells, and Chinese hamster ovary (CHO) cells. Among them, CHO cells and HEK 293 cells are preferred.

[0138] When cells are used as hosts, combinations of expression vectors and host cells to be used vary with experimental objects. According to such combinations, two types of expression (i.e. transient expression and constitutive expression) can be included.

[0139] “Transformation” of microorganisms and cells in the above step (C) refers to introducing DNA into microorganisms or cells by forcible methods or phagocytosis of cells and then transiently or constitutively expressing the trait of the DNA in a plasmid or an intra-chromosome integrated form. Those skilled in the art can carry out transformation by known methods [see e.g., “Idenshi Kougaku Handbook (Genetic Engineering Handbook)”, an extra issue of “Jikken Igaku (Experimental Medicine)”, YODOSHA CO., LTD.]. For example, in the case of animal cells, DNA can be introduced into cells by known methods such as DEAE-dextran method, calcium-phosphate-mediated transfection, electroporation, lipofection, etc. For stable expression of the protein of the present invention using animal cells, there is a method in which selection can be carried out by clonal selection of the animal cells containing the chromosomes into which the introduced expression vectors have been integrated. For example, transformants can be selected using the above selectable marker as an indication of successful transformation. In addition, the animal cells thus obtained vising the selectable marker can be subjected to repeated clonal selection to obtain stable animal cell strains highly capable of expressing the protein of the present invention. When a dihydrofolate reductase (DHFR) gene is used as a selectable marker, one can culture animal cells while gradually increasing the concentration of methotrexate (MTX) and select the resistant strains, thereby amplifying the DNA encoding the protein of the present invention together with the DHFR gene to obtain animal cell strains having higher levels of expression.

[0140] The above transformed cells can be cultured under conditions which permit the expression of the DNA encoding the protein of the present invention to produce and accumulate the protein of the present invention. In this manner, the protein of the present invention can be produced. Thus, the present invention also includes a process for producing a protein, which comprises culturing a transformed cell comprising the isolated polynucleotide according to above item (3) to (6) under conditions providing expression of the encoded protein and recovering the protein from the culture.

[0141] The above transformed cells can be cultured by methods known to those skilled in the art (see e.g., “Bio Manual Series 4”, YODOSHA CO., LTD.). For example, animal cells can be cultured by various known animal cell culture methods including attachment culture such as Petri dish culture, multitray type culture and module culture, attachment culture in which cells are attached to cell culture carriers (microcarriers), suspension culture in which productive cells themselves are suspended. Examples of media for use in the culture include media commonly used for animal cell culture, such as D-MEM and RPMI 1640.

[0142] In order to separate and purify the protein of the present invention from the above culture, suitable combinations of per se known separation and purification methods can be used. Examples such methods include methods based on solubility, such as salting-out and solvent precipitation; methods based on the difference in charges, such as ion-exchange chromatography; methods mainly based on the difference in molecular weights, such as dialysis, ultrafiltration, gel filtration and SDS-polyacrylamide gel electrophoresis; methods based on specific affinity, such as affinity chromatography; methods based on the difference in hydrophobicity, such as reverse phase high performance liquid chromatography; and methods based on the difference in isoelectric points, such as isoelectric focusing. For example, a protein of the present invention can be recovered and purified from recombinant cell cultures by well-known methods including ammonium sulfate or ethanol precipitation, acid extraction, anion or cation exchange chromatography, phosphocellulose chromatography, hydrophobic interaction chromatography, affinity chromatography, hydroxyapatite chromatography and lectin chromatography. Most preferably, high performance liquid chromatography is employed for purification. Well known techniques for refolding proteins may be employed to regenerate active conformation when the polypeptide is denatured during intracellular synthesis, isolation or purification.

[0143] The protein of the present invention can also be produced as a fusion protein with another protein. These fusion proteins are also included within the present invention. For the expression of such fusion proteins, any vectors can be used so long as the DNA encoding the protein can be inserted into the vectors and the vectors can express the fusion protein. Examples of proteins to which a polypeptide of the present invention can be fused include glutathione S-transferase (GST) and a hexa-histidine sequence (6×His). The fusion protein of the protein of the present invention with another protein can be advantageously purified by affinity chromatography using a substance with an affinity for the fusion partner protein. For example, fusion proteins with GST can be purified by affinity chromatography using glutathione as a ligand.

[0144] The present invention also includes an inhibitory protein, i.e., a protein capable of inhibiting the activity of the protein of above item (7). Examples of such inhibitory proteins include antibodies, or other proteins that bind to active sites of a protein of the above item (7), thereby inhibiting the expression of their activity.

[0145] The present invention also relates to an antibody that reacts with the protein of the present invention or a fragment thereof, and to production of such an antibody. More preferably, the present invention relates to an antibody that reacts specifically with the above-mentioned protein of the present invention or a fragment thereof. Herein, “specifically” refers to there being little, or preferably no, crossreactivity. The antibody is not specifically limited so long as it can recognize the protein of the present invention. Examples of such antibodies include polyclonal antibodies, monoclonal antibodies and their fragments, single chain antibodies and humanized antibodies. Antibody fragments can be produced by known techniques. Examples of such antibody fragments include, but not limited to, F(ab′)₂ fragments, Fab′ fragments, Fab fragments and Fv fragments. The antibody that specifically binds the protein of the present invention can be produced using the protein of the present invention or a peptide thereof as an immunogen according to per se known process for producing antibodies or antisera. For example, a monoclonal or polyclonal antibody can be produced by administering the protein according to above item (1) or (2) as an antigen or epitope-bearing fragments to a non-human animal. Such methods are described, for example, in “Shin Idenshi Kougaku Handbook (New Genetic Engineering Handbook)”, the third edition, an extra issue of “Jikken Igaku (Experimental Medicine)”, YODOSHA CO., LTD.

[0146] In the case of polyclonal antibodies, for example, the protein of the present invention or a peptide thereof can be injected to animals such as rabbits to produce antibodies directed against the protein or peptide, and then their blood can be collected. The polyclonal antibodies can be purified from the blood, for example, by ammonium sulfate precipitation or ion-exchange chromatography, or by using the affinity column on which the protein has been immobilized.

[0147] In the case of monoclonal antibodies, for example, animals such as mice are immunized with the protein of the present invention, their spleen is removed and homogenized to obtain spleen cells, which are then fused with mouse myeloma cells by using a reagent such as polyethylene glycol. From the resulting hybrid cells (i.e. hybridoma cells), the clone producing the antibody directed against the protein of the present invention can be selected. Then, the resulting clonal hybridoma cells can be implanted intraperitoneally into mice, the ascitic fluid recovered from the mice. The resulting monoclonal antibody can be purified, for example, by ammonium sulfate precipitation or ion-exchange chromatography, or by using the affinity column on which the protein has been immobilized.

[0148] When the resulting antibody is used to administer to humans, it is preferable to use a humanized antibody or human antibody in order to reduce its immunogenicity. These humanized antibodies or human antibodies can be produced using transgenic mice or other mammals. For a general review of humanized antibodies, see, for example, Morrison, S. L. et al., Proc. Natl. Acad. Sci. USA, 81:6851-6855 (1984); Jones, P. T. et al., Nature 321:522-525 (1986); Hiroshi Noguchi, Igaku no Ayumi (J. Clin. Exp. Med.) 167:457-462 (1993); Takashi Matsumoto, Kagaku to Seibutsu (Chemistry and Biology) 36:448-456 (1998). Humanized chimeric antibodies can be produced by linking a V region of a mouse antibody to a C region of a human antibody. Humanized antibodies can be produced by substituting a sequence derived from a human antibody for a region other than a complementarity-determining region from a mouse monoclonal antibody. In addition, human antibodies can be directly produced in the same manner as the production of conventional monoclonal antibodies by immunizing the mice whose immune systems have been replaced with human immune systems. These antibodies can be used to isolate or to identify clones expressing the protein or to purify the protein of the present invention from a cell extract or transformed cells producing the protein of the present invention. These proteins can also be used to construct ELISA, RIA (radioimmunoassay) and western blotting systems. These assay systems can be used for diagnostic purposes for detecting an amount of the protein of the present invention present in a body sample in a tissue or a fluid in the blood of an animal, preferably human. For example, they can be used for diagnosis of a disease characterized by undesirable activation of STAT6 resulting from (expression) abnormality of the protein of the present invention, such as allergic disease, inflammation, autoimmune disease, diabetes, hyperlipidemia, infection (for example, HIV infection), cancer and the like. In order to provide a basis for diagnosis of a disease, a standard value must be established. However, this is a well-known technique to those skilled in the art. For example, a method of calculating the standard value comprises binding a body fluid or a cell extract of normal individual of a human or an animal to an antibody against the protein of the present invention under a suitable condition for the complex formation, detecting the amount of the antibody-protein complex by chemical or physical means and then calculating the standard value for the normal sample using a standard curve prepared from a standard solution containing a known amount of an antigen (the protein of the present invention). The presence of a disease can be confirmed by deviation from the standard value obtained by comparison of the standard value with the value obtained from a sample of an individual latently suffering from a disease associated with the protein of the present invention. These antibodies can also be used as reagents for studying functions of the protein of the present invention.

[0149] The antibodies of the present invention can be purified and then administered to patients characterized by undesirable activation of STAT6 resulting from (expression) abnormality of the protein of the present invention, such as allergic disease, inflammation, autoimmune disease, diabetes, hyperlipidemia, infection (such as HIV infection), cancer and the like. Thus in another aspect, the present invention is a pharmaceutical composition which comprises the above antibody as an active ingredient, and therapy using the antibody of the present invention. In such pharmaceutical compositions, the active ingredient may be combined with other therapeutically active ingredients or inactive ingredients (e.g., conventional pharmaceutically acceptable carriers or diluents such as immunogenic adjuvants) and physiologically non-toxic stabilizers and excipients. The resulting combinations can be sterilized by filtration, and formulated into vials after lyophilization or into various dosage forms in stabilized and preservable aqueous preparations. Administration to a patient can be intra-arterial administration, intravenous administration and subcutaneous administration, which are well known to those skilled in the art. The dosage range depends upon the weight and age of the patient, route of administration and the like. Suitable dosages can be determined by those skilled in the art. These antibodies exhibit therapeutic activity by inhibiting the promotion of STAT6 activation mediated by the protein of the present invention.

[0150] The DNA of the present invention can also be used to isolate, identify and clone other proteins involved in intracellular signal transduction processes. For example, the DNA sequence encoding the protein of the present invention can be used as a “bait” in yeast two-hybrid systems (see e.g., Nature 340:245-246 (1989)) to isolate and clone the sequence encoding a protein (“prey”) which can associate with the protein of the present invention. In a similar manner, it can be determined whether the protein of the present invention can associate with other cellular proteins (e.g., STAT6, JAK1). In another method, proteins which can associate with the protein of the present invention can be isolated from cell extracts by immunoprecipitation [see e.g., “Shin Idenshi Kougaku Handbook (New Genetic Engineering Handbook)”, an extra issue of “Jikken Igaku (Experimental Medicine)”, YODOSHA CO., LTD.] using antibodies directed against the protein of the present invention. In still another method, the protein of the present invention can be expressed as a fusion protein with another protein as described above, and immunoprecipitated with an antibody directed against the fusion protein in order to isolate a protein which can associate with the protein of the present invention.

[0151] The diagnostic assays offer a process for diagnosing or determining a susceptibility to the diseases through detection of mutation in the nucleotide sequence encoding STAT6 activation-promoting protein by the methods described. In addition, such diseases may be diagnosed by methods comprising determining from a sample derived from a subject an abnormally decreased or increased level of protein or mRNA. Decreased or increased expression can be measured at the RNA level using any of the methods well known in the art for the quantitation of polynucleotides, such as, for example, nucleic acid amplification, for instance PCR, RT-PCR, RNase protection method, Northern blotting and other hybridization methods. Assay techniques that can be used to determine levels of a protein in a sample derived from a host are well-known to those skilled in the art. Such assay methods include radioimmunoassays, competitive-binding assays, Western blot analysis and ELISA assays.

[0152] The DNA of the present invention can be used to detect abnormality in the DNA or mRNA encoding the protein of the present invention or a peptide fragment thereof. The invention relates to a method for diagnosing a disease, or susceptibility to a disease associated with the expression of the protein according to above item (1), (2) or (7) in a subject, which comprises determining mutations in the polynucleotide sequence encoding the protein. Thus, for example, the DNA of the present invention is useful for gene diagnosis regarding damage, mutations, and reduced, increased or over-expression of the DNA or mRNA. That is, the present invention includes a method for diagnosing a disease associated with the expression or activity of said protein in a subject, which comprises the steps of:

[0153] A process for diagnosing a disease or susceptibility to a disease in a subject related to expression or activity of the protein of above item (1), (2) or (7) in a subject comprising:

[0154] (a) determining the presence or absence of a mutation in the nucleotide sequence encoding said protein in the genome of said subject; and/or

[0155] (b) analyzing the amount of expression of said protein in a sample derived from said subject, wherein a diagnosis of disease is made when the amount of the protein expressed is 2-fold or higher than normal, or half or lower than normal.

[0156] When the nucleotide sequence encoding STAT6 activation-promoting protein contains a mutation according to the above step (a), the mutation may cause disease associated with the expression or activity of STAT6. When the amount of the expression of the protein of above item (1), (2) or (7) is different from the normal value according to the above step (b), the abnormal expression of the STAT6 activation-promoting new protein of the present invention may be responsible for diseases associated with the expression or activity of STAT6. Determination of the presence or absence of a mutation in the nucleotide sequence encoding STAT6 activation-promoting protein in the above step (a) may involve RT-PCR using a part of the nucleotide sequence encoding said protein as a primer, followed by conventional DNA sequencing to detect the presence or absence of the mutation. PCR-SSCP [Genomics 5:874-879 (1989); “Shin Idenshi Kougaku Handbook (New Genetic Engineering Handbook)”, an extra issue of “Jikken Igaku (Experimental Medicine)”, YODOSHA CO., LTD.] can also be used to determine the presence or absence of the mutation. Measurement of the amount of the expression of the protein in the above step (b) may involve, for example, using the antibody of above item (16).

[0157] The present invention also relates to a method for screening compounds for activity as inhibitors or promoters of STAT6 activation.

[0158] It should be noted that compounds that inhibit STAT6 activation, will, as a result of this action, have in vivo and in vitro activity as a STAT6 inhibiting agent. Also, compounds that promote STAT6 activation, will, as a result of this action, have in vivo and in vitro activity as a STAT6 activating agent. Consequently, the above screening method is for screening in respect of activity as an inhibiting agent or activating agent of STAT6, and the above compound is a compound having activity as an inhibiting agent or activating agent of STAT6.

[0159] The above screening method comprises the following steps:

[0160] (a) providing a cell with a gene encoding a protein that promotes STAT6 activation, and a component that provides a detectable signal upon activation of STAT6;

[0161] (b) culturing the transformed cell under conditions, which permit the expression of the gene in the transformed cell;

[0162] (c) contacting the transformed cell with one or more compounds; and

[0163] (d) measuring the detectable signal; and

[0164] (e) isolating or identifying as an activator compound and/or inhibitor compound according to the detectable signal.

[0165] A compound that increases the detectable signal 2-fold or higher than normal is preferably isolated or identified as an activator compound, and a compound that decreases the detectable signal 80% or less than normal is preferably isolated or identified as an inhibitor compound.

[0166] Examples of components capable of providing a detectable signal include reporter genes. Reporter genes are used instead of directly detecting the activation of transcription factors of interest. The transcriptional activity of a promoter of a gene is analyzed by linking the promoter to a reporter gene and measuring the activity of the product of the reporter gene (“Bio Manual Series 4” (1994), YODOSHA CO., LTD.).

[0167] Any peptide or protein can be used so long as those skilled in the art can measure the activity or amount of the expression product (including the amount of the produced mRNA) of the reporter genes. For example, enzymatic activity of chloramphenicol acetyltransferase, β-galactosidase, luciferase, etc., can be measured. Any reporter plasmids can be used to evaluate STAT6 activation so long as the reporter plasmids have an STAT6 recognition sequence inserted upstream of the reporter gene. For example, a sequence derived from the CD23 or germline C epsilon transcription initiation site can be used. Other examples include reporter plasmids described in J. Biol. Chem. 275, 26500-26506 (2000), J. Exp. Med. 190, 1837-1848 (1999), J. Immunol. 150, 5408-5417 (1993), J. Immunol. 157, 2058-2065 (1996).

[0168] Any host cells can be used so long as promotion of STAT6 activation can be detected in the host cells. Preferred host cells are mammalian cells such as NIH3T3 cells, HepG2 cells and the like. Transformation and culture of the cells can be carried out as described above.

[0169] In a specific embodiment, the method for screening a compound which inhibits or promotes STAT6 activation comprises culturing the transformed cell for a certain period of time, adding a certain amount of a test compound, measuring the reporter activity expressed by the cell after a certain period of time, and comparing the activity with that of a cell to which the test compound has not been added. On this occasion, proper stimulation, e.g. addition of IL-4, etc. may be optionally carried out at the same time. The reporter activity can be measured by methods known in the art (see e.g., “Bio Manual Series 4” (1994), YODOSHA CO., LTD.). Examples of test compounds include, but not limited to, low molecular weight compounds and peptides. Test compounds may be artificially synthesized compounds or naturally occurring compounds. Test compounds may be a single compound or mixtures. Examples of such detectable signals which may be measured include the amount of mRNA or proteins for genes whose expression is known to be induced accordingly by STAT6 activation (e.g., genes for IL-1 Receptor Antagonist, CD23, MHC Class II and STAT6) in addition to the above reporter genes. Activated STAT6 can also be quantified by a method for detecting bindings of DNA and protein such as gel mobility shift assay, etc. Alternatively, phosphorylation of STAT6 can be quantified with cell extracts.

[0170] The amount of mRNA can be measured, for example, by northern hybridization, RT-PCR, etc. The amount of proteins can be measured, for example, by using antibodies. The antibodies may be produced by known methods. Commercially available antibodies(from, e.g., Wako Pure Chemical Industries, Ltd.) can also be used.

[0171] It is also possible to produce a pharmaceutical composition according to the following steps (a) to (f):

[0172] (a) providing a cell with a gene encoding a protein that promotes STAT6 activation, and a component that provides a detectable signal upon activation of STAT6;

[0173] (b) culturing the transformed cell under conditions, which permit the expression of the gene in the transformed cell;

[0174] (c) contacting the transformed cell with one or more candidate compounds;

[0175] (d) measuring the detectable signal; and

[0176] (e) isolating or identifying as an activator compound and/or an inhibitor compound according to the detectable signal; and

[0177] (f) optimizing the isolated or identified compound as a pharmaceutical composition.

[0178] The protein of the present invention may also be used in a method for the structure-based design of an agonist, antagonist or inhibitor of the protein, by:

[0179] (a) determining in the first instance the three-dimensional structure of the protein;

[0180] (b) deducing the three-dimensional structure for the likely reactive or binding site(s) of an agonist, antagonist or inhibitor;

[0181] (c) synthesising candidate compounds that are predicted to bind to or react with the deduced binding or reactive site; and

[0182] (d) testing whether the candidate compounds are indeed agonists, antagonists or inhibitor.

[0183] The present invention also includes a compound obtainable by the above screening method. However, the screening method of the present invention is not limited to the above method. The present invention also includes a process for producing the pharmaceutical composition by the method of above item (14).

[0184] There is no special limitation to the above candidate compounds. Such compounds include low molecular weight compounds and peptides. They may be artificially synthesised compounds and naturally occurring compounds. As the compounds obtained by the above screening methods have a function as inhibiting or promoting STAT6 activation, they are useful as therapeutic or preventive pharmaceuticals for the treatment of diseases resulting from unfavorable activation or inactivation of STAT6. In order to isolate and purify the target compounds from the mixture, it is suitable to combine the known methods such as filtration, extraction, washings, drying, concentration, crystallization, various chromatography. When obtainment of a salt of the compounds is desired, a compound which is obtained in the form of a salt can be purified as it is. A compound which is obtained in the free form can be converted into a salt by isolating and purifying a salt obtained by dispersing or dissolving the compound into a suitable solvent and then adding a desired acid or base. Examples of a step to optimize the compounds or salts thereof obtained by the method of the present invention as a pharmaceutical composition, include methods of formulating according to ordinary processes such as the following. The above compounds or their pharmaceutically acceptable salts in an amount effective as an active ingredient, and pharmaceutically acceptable carriers can be mixed. Further, a form of formulation suitable for the selected mode of administration is selected. A composition suitable for oral administration includes a solid form such as tablet, granule, capsule, pill and powder, and solution form such as solution, syrup, elixir and dispersion. A form useful for parenteral administration includes sterile solution, dispersion, emulsion and suspension. The above carriers include, for example, sugars such as gelatin, lactose and glucose, starches such corn, wheat, rice and maize, fatty acids such as stearic acid, salts of fatty acids such as calcium stearate, magnesium stearate, talc, vegetable oil, alcohol such as stearyl alcohol and benzyl alcohol, gum, and polyalkylene glycol. Examples of such liquid carriers include generally water, saline, sugar solution of dextrose and the like, glycols such as ethylene glycol, propylene glycol and polyethylene glycol.

[0185] The present invention also includes a kit for screening compounds for activity as an inhibitor or promoter of STAT6 activation. The kit comprises reagents and the like necessary for screening compounds for inhibiting or promoting activity for STAT6 activation, including:

[0186] (a) a cell comprising a gene encoding a protein that promotes STAT6 activation, and a component that provides a detectable signal enabling detection of STAT6 activation after activation of STAT6; and

[0187] (b) reagents for measuring the detectable signal.

[0188] In another aspect, the present invention relates to a diagnostic kit which comprises:

[0189] (a) a polynucleotide of the present invention having a nucleotide sequence represented by any one of SEQ ID NOS: 2, 4, 6, 8, 10, 12, 14, 16, 18, 20, 22, 24, 26, 28, 30, 32, 34, 36, 38, 40, 42, 44, 46, 48, 50, 52, 54, 56, 58, 60, 62, 64, 66, 68, 69, 71, 73, 75, 77, 79, 81, 83, 85, 87, 89, 91, 93, 95, 97, 99, 101, 103, 105, 107, 109, 111, 113, 115, 117, 119, 121, 123, 125, 127, 129, 131, 133, 135, 137, 139, 141, 143, 145, 147, 149, 151, 153, 155, 157, 159, 161, 163, 165, 167, 169, 171, 173, 175, 177, 179, 181, 183, 185, 187, 189, 191, 193, 195, 197, 199, 201, 203, 205, 207, 209, 211, 213, 215, 217, 219, 221, 223, 225, 227, 229, 231, 233, 235, 237, 239, 241, 243, 245, 247, 249, 251, 253, 255, 257, 259, 261, 263, 265, 267, 269, 271, 273, 275, 277, 279, 281, 283, 285, 287, 289, 291, 293, 295, 297, 299, 301, 303, 305, 307, 309, 311, 313, 315, 317, 319, 321, 323, 325, 327, 329, 331, 333, 335, 337, 339, 341, 343, 345, 347, 349, 351, 353, 355, 357, 359, 361, 363, 365, 367, 369, 371, 373, 375, 377, 379, 381, 383, 385, 387, 389, 391, 393, 395, 397, 399, 401, 403, 405, 407, 409, 411, 413, 415, 417, 419, 421, 423, 425, 427, 429, 431, 433, 435, 437, 439, 441, 443, 445, 447, 449, 451, 453, 455, 457, 459, 461, 463, 465, 467, 469, 471, 473, 475, 477, 479, 481 and 483;

[0190] (b) a polynucleotide having a nucleotide sequence complementary to that of (a);

[0191] (c) a protein of the present invention having an amino acid sequence represented by any one of SEQ ID NOS: 1, 3, 5, 7, 9, 11, 13, 15, 17, 19, 21, 23, 25, 27, 29, 31, 33, 35, 37, 39, 41, 43, 45, 47, 49, 51, 53, 55, 57, 59, 61, 63, 65, 67, 70, 72, 74, 76, 78, 80, 82, 84, 86, 88, 90, 92, 94, 96, 98, 100, 102, 104, 106, 108, 110, 112, 114, 116, 118, 120, 122, 124, 126, 128, 130, 132, 134, 136, 138, 140, 142, 144, 146, 148, 150, 152, 154, 156, 158, 160, 162, 164, 166, 168, 170, 172, 174, 176, 178, 180, 182, 184, 186, 188, 190, 192, 194, 196, 198, 200, 202, 204, 206, 208, 210, 212, 214, 216, 218, 220, 222, 224, 226, 228, 230, 232, 234, 236, 238, 240, 242, 244, 246, 248, 250, 252, 254, 256, 258, 260, 262, 264, 266, 268, 270, 272, 274, 276, 278, 280, 282, 284, 286, 288, 290, 292, 294, 296, 298, 300, 302, 304, 306, 308, 310, 312, 314, 316, 318, 320, 322, 324, 326, 328, 330, 332, 334, 336, 338, 340, 342, 344, 346, 348, 350, 352, 354, 356, 358, 360, 362, 364, 366, 368, 370, 372, 374, 376, 378, 380, 382, 384, 386, 388, 390, 392, 394, 396, 398, 400, 402, 404, 406, 408, 410, 412, 414, 416, 418, 420, 422, 424, 426, 428, 430, 432, 434, 436, 438, 440, 442, 444, 446, 448, 450, 452, 454, 456, 458, 460, 462, 464, 466, 468, 470, 472, 474, 476, 478, 480, 482 and 484 or a fragment thereof; or

[0192] (d) an antibody to a protein of the present invention of (c).

[0193] A kit comprising at least any one of (a) to (d) is useful for diagnosing a disease or susceptibility to a disease such as allergic disease, inflammation, autoimmune diseases, diabetes, hyperlipidemia, infectious diseases (e.g., HIV infection) and cancers.

[0194] Because STAT6 is involved in a wide variety of pathological conditions such as allergic disease, inflammation, autoimmune diseases, diabetes, hyperlipidemia, cancers and viral infections, it is an attractive target for drug design and therapeutic intervention. Many experiments show that the inhibition of STAT6 activity may have significant physiological effects [see e.g., Nature 380, 627-630 (1996), Nature 380, 630-633 (1996), Immunity 4, 313-319 (1996), J. Immunol. 157, 3220-3222 (1996), Immunity 8, 255-264 (1998), J. Exp. Med. 187, 939-948 (1998), J. Exp. Med. 187, 1537-1542 (1998)] The finding of the new protein described herein capable of promoting STAT6 activation has provided a new method for inhibiting an abnormal STAT6 function. Thus, the present invention also relates to use of a compound which inhibits the function of the protein capable of promoting STAT6 activation described above, for inhibiting STAT6 activation. The compound obtained by the above screening method, which inhibits STAT6 activation, is useful as a medicament to treat or prevent diseases characterized by undesirable activation of STAT6, such as allergic disease, inflammation, autoimmune diseases, diabetes, hyperlipidemia, infectious diseases (e.g., HIV infection) and cancers.

[0195] On the other hand, since STAT6 activation promotes differentiation into Th2 cells, there is also a possibility of reducing symptoms of or treating Th1 hyperactive diseases, for example, organ-specific autoimmune diseases such as multiple sclerosis and insulin-dependent diabetes mellitus, and rheumatism. Thus, the compound obtained by the above screening method, which promotes STAT6 activation, is useful as a medicament to treat or prevent these diseases.

[0196] In addition, the gene encoding the protein of the present invention is useful for gene therapy to treat various diseases such as cancers, autoimmune diseases, diabetes, hyperlipidemia, allergy diseases and inflammatory response. “Gene therapy” refers to administering into the human body a gene or a cell into which a gene has been introduced. The protein of the present invention and the DNA encoding the protein can also be used for diagnostic purposes.

[0197] The compound obtained by the screening method of the present invention or a salt thereof can be formulated into the above pharmaceutical compositions (e.g., tablets, capsules, elixirs, microcapsules, sterile solutions and suspensions) according to conventional procedures. The formulations thus obtained are safe and of low toxicity, and can be administered, for example, to humans and mammals (e.g., rats, rabbits, sheep, pigs, cattle, cats, dogs and monkeys). Administration to patients can be carried out by methods known in the art, such as intra-arterial injection, intravenous injection and subcutaneous injection. The dosage may vary with the weight and age of the patient as well as a mode of administration, but those skilled in the art can appropriately select suitable dosages. When the compound can be encoded by DNA, the DNA can be inserted into a vector for gene therapy, and gene therapy can be carried out. The dosage and mode of administration may vary with the weight, age and symptoms of the patient, but those skilled in the art can appropriately select them. Thus, the present invention also relates to a pharmaceutical composition which comprises the above compound as an active ingredient.

[0198] In addition, the above compound is useful as a medicament to treat or prevent diseases characterized by undesirable activation of STAT6, such as allergic disease, inflammation, autoimmune diseases, diabetes, hyperlipidemia, viral diseases, infectious diseases and cancers. Thus, the present invention also relates to a pharmaceutical composition for allergic disease, inflammation, autoimmune diseases, diabetes, hyperlipidemia, viral diseases, cancers, etc., which comprises the above compound. Specifically, the pharmaceutical composition is useful as a therapeutic and prophylactic drug against, for example, rheumatoid arthritis, osteoarthritis, systemic lupus erythematosus, diabetes, sepsis, asthma, allergic rhinitis, ischemic heart diseases, inflammatory intestinal diseases, subarachnoid hemorrhage, viral hepatitis and AIDS.

[0199] The present invention also relates to the use of a pharmaceutical composition produced according to above item (14) for manufacturing a medicament against allergic disease, inflammation, autoimmune diseases, diabetes, hyperlipidemia, viral diseases, cancers, etc.

[0200] The present invention also includes an antisense oligonucleotide against a gene of any one of above items (3) to (6). An antisense oligonucleotide refers to an oligonucleotide complementary to the target gene sequence. The antisense oligonucleotide can inhibit the expression of the target gene by inhibiting RNA functions such as translation to proteins, transport to the cytoplasm and other activity necessary for overall biological functions. In this case, the antisense oligonucleotide may be RNA or DNA. The DNA sequence of the present invention can be used to produce an antisense oligonucleotide capable of hybridizing with the mRNA transcribed from the gene encoding the protein of the present invention. It is known that an antisense oligonucleotide generally has an inhibitory effect on the expression of the corresponding gene (see e.g., Saibou Kougaku Vol.13, No.4 (1994)). The oligonucleotide containing an antisense coding sequence against a gene encoding the protein of the present invention can be introduced into a cell by standard methods. The oligonucleotide effectively blocks the translation of mRNA of the gene encoding the protein of the present invention, thereby blocking its expression and inhibiting undesirable activity.

[0201] The oligonucleotide of the present invention may be a naturally occurring oligonucleotide or its modified form [see e.g., Murakami & Makino, Saibou Kougaku Vol.13, No.4, p.259-266 (1994); Akira Murakami, Tanpakushitsu Kakusan Kouso (PROTEIN, NUCLEIC ACID AND ENZYME) Vol.40, No.10, p.1364-1370 (1995), Tunenari Takeuchi et al., Jikken Igaku (Experimental Medicine) Vol.14, No.4 p85-95(1996)]. Thus, the oligonucleotide may have modified sugar moieties or inter-sugar moieties. Examples of such modified forms include phosphothioates and other sulfur-containing species used in the art. According to several preferred embodiments of the present invention, at least one phosphodiester bond in the oligonucleotide is substituted with the structure which can enhance the ability of the composition to permeate cellular regions where RNA with the activity to be regulated is located.

[0202] Such substitution preferably involves a phosphorothioate bond, a phosphoramidate bond, methylphosphonate bond, or a short-chain alkyl or cycloalkyl structure. The oligonucleotide may also contain at least some modified base forms. Thus, it may contain purine and pyrimidine derivatives other than naturally occurring purine and pyrimidine. Similarly, the furanosyl moieties of the nucleotide subunits can be modified so long as the essential purpose of the present invention is attained. Examples of such modifications include 2′-O-alkyl and 2′-halogen substituted nucleotides. Examples of modifications in sugar moieties at their 2-position include OH, SH, SCH₃, OCH₃, OCN or O(CH₂)ₙCH₃, wherein n is 1 to about 10, and other substituents having similar properties. All the analogues are included in the scope of the present invention so long as they can hybridize with the mRNA of the gene of the present invention to inhibit functions of the mRNA.

[0203] The oligonucleotide of the present invention contains about 3 to about 50 nucleotides, preferably about 8 to about 25 nucleotides, more preferably about 12 to about 20 nucleotides. The oligonucleotide of the present invention can be produced by the well-known solid phase synthesis technique. Devices for such synthesis are commercially available from some manufactures including Applied Biosystems. Other oligonucleotides such as phosphothioates can also be produced by methods known in the art.

[0204] The oligonucleotide of the present invention is designed to hybridize with the mRNA transcribed from the gene of the present invention. Those skilled in the art can easily design an antisense oligonucleotides based on a given gene sequence (For example, Murakami and Makino: Saibou Kougaku Vol. 13 No.4 p259-266 (1994), Akira Murakami: Tanpakushitsu Kakusan Kouso (PROTEIN, NUCLEIC ACID AND ENZYME) Vol. 40 No.10 p1364-1370 (1995), Tunenari Takeuchi et al., Jikken Igaku (Experimental Medicine) Vol. 14 No. 4 p85-95 (1996)). Recent study suggests that antisense oligonucleotides which are designed in a region containing 5′ region of mRNA, preferably, the translation initiation site, are most effective for the inhibition of the expression of a gene. The length of the antisense oligonucleotides is preferably 15 to 30 nucleotides and more preferably 20 to 25 nucleotides. It is important to confirm no interaction with other mRNA and no formation of secondary structure in the oligonucleotide sequence by homology search. The evaluation of whether the designed antisense oligonucleotide is functional or not can be determined by introducing the antisense oligonucleotide into a suitable cell and measuring the amount of the target mRNA, for example by northern blotting or RT-PCR, or the amount of the target protein, for example by western blotting or fluorescent antibody technique, to confirm the effect of expression inhibition

[0205] Another method includes the triple helix technique. This technique involves forming a triple helix on the targeted intra-nuclear DNA sequence, thereby regulating its gene expression, mainly at the transcription stage. The oligonucleotide is designed mainly in the gene region involved in the transcription and inhibits the transcription and the production of the protein of the present invention. Such RNA, DNA and oligonucleotide can be produced using known synthesizers.

[0206] The oligonucleotide may be introduced into the cells containing the target nucleic acid sequence by any of DNA transfection methods such as calcium phosphate method, electroporation, lipofection, microinjection, or gene transfer methods including the use of gene transfer vectors such as viruses. An antisense oligonucleotide expression vector can be prepared using a suitable retrovirus vector, then the expression vector can be introduced into the cells containing the target nucleic acid sequence by contacting the vector with the cells in vivo or ex vivo.

[0207] The DNA of the present invention can be used in the antisense RNA/DNA technique or the triple helix technique to inhibit promotion of STAT6 activation mediated by the protein of the present invention.

[0208] The antisense oligonucleotide against the gene encoding the protein of the present invention is useful as a medicament to treat or prevent diseases characterized by undesirable activation of STAT6, such as allergic disease, inflammation, autoimmune diseases, diabetes, hyperlipidemia, infectious diseases (e.g., HIV infection) and cancers. Thus, the present invention also includes a pharmaceutical composition which comprises the above antisense oligonucleotide as an active ingredient. The antisense oligonucleotide can also be used to detect such diseases using northern hybridization or PCR.

[0209] The present invention also includes a ribozyme which inhibits STAT6 activation. A ribozyme is an RNA capable of recognizing a nucleotide sequence of a nucleic acid and cleaving the nucleic acid (see e.g., Hiroshi Yanagawa, “Jikken Igaku (Experimental Medicine) Bioscience 12: New Age of RNA). The ribozyme can be produced so that it cleaves the selected target RNA (e.g., mRNA encoding the protein of the present invention). Based on the nucleotide sequence of the DNA encoding the protein of the present invention, the ribozyme specifically cleaving the mRNA of the protein of the present invention can be designed. Such ribozyme has a complementary sequence to the mRNA for the protein of the present invention, complementarily associates with the mRNA and then cleaves the mRNA, which results in reduction or entire loss of the expression of the protein of the present invention. The level of the reduction of the expression is dependent on the level of the ribozyme expression in the target cells.

[0210] There are two types of ribozyme commonly used: a hammerhead ribozyme and a hairpin ribozyme. In particular, hammerhead ribozymes have been well studied regarding their primary and secondary structure necessary for their cleavage activity, and those skilled in the art can easily design the ribozymes nucleotides solely on the nucleotide sequence information for the DNA encoding the protein of the present invention [see e.g., Iida et al., Saibou Kougaku Vol.16, No.3, p.438-445 (1997); Ohkawa & Taira, Jikken Igaku (Experimental Medicine) Vol.12, No.12, p.83-88 (1994)]. It is known that the hammerhead ribozymes have a structure consisting of two recognition sites (recognition site I and recognition site II forming a chain complementary to target RNA) and an active site, and cleave the target RNA at the 3′end of its sequence NUX (wherein N is A or G or C or U, and X is A or C or U) after the formation of a complementary pair with the target RNA in the recognition sites. In particular, the sequence GUC (or GUA) has been found to have the highest activity [see e.g., Koizumi, M. et al., Nucl. Acids Res. 17:7059-7071 (1989); Iida et al., Saibou Kougaku Vol.16, No.3, p.438-445 (1997); Ohkawa & Taira, Jikken Igaku (Experimental Medicine) Vol.12, No.12, p.83-88 (1994); Kawasaki & Taira, Jikken Igaku (Experimental Medicine) Vol.18, No.3, p.381-386 (2000)].

[0211] Therefore the sequence GTC (or GTA) is searched out, and a ribozyme is designed to form several, up to 10 to 20 complementary base pairs around that sequence. The suitability of the designed ribozyme can be evaluated by checking whether the prepared ribozyme can cleave the target mRNA in vitro according to the method described for example in Ohkawa & Taira, Jikken Igaku (Experimental Medicine) Vol.12, No.12, p.83-88 (1994). The ribozyme can be prepared by methods known in the art to synthesize RNA molecules.

[0212] Alternatively, the sequence of the ribozyme can be synthesized on a DNA synthesizer and inserted into various vectors containing a suitable RNA polymerase promoter (e.g., T7 or SP6) to enzymatically synthesize an RNA molecule in vitro. Such ribozymes can be introduced into cells by gene transfer methods such as microinjection. Another method involves inserting a ribozyme DNA into a suitable expression vector and introducing the vector into cell strains, cells or tissues. Suitable vectors can be used to introduce the ribozyme into a selected cell. Examples of vectors commonly used for such purpose include plasmid vectors and animal virus vectors (e.g., retrovirus, adenovirus, herpes or vaccinia virus vectors). Such ribozymes are capable of inhibiting promotion of STAT6 activation mediated by the protein of the present invention.

[0213] DNA encoding the protein which acts to promote STAT6 activation of the present invention was obtained by a method which comprises using the oligo-capping method to construct a full-length cDNA library, and using a signal factor indicative of the presence of a protein having the function. An example of such a signal factor is a reporter gene.

[0214] Methods using a cDNA library containing a lot of non-full-length cDNAs are inefficient in obtaining many genes (cDNAs) having functions. Therefore libraries with a high ratio of the number of the full-length cDNA clones to the total number of the clones are necessary. “Full-length cDNA” refers to a complete DNA copy of mRNA from a gene. The cDNA libraries produced using the oligo-capping method contain full-length cDNA clones in a ratio of 50 to 80%, namely, a 5 to 10-fold increase in full-length cDNA clones compared to the cDNA libraries produced by prior art methods (Sumio Sugano, the monthly magazine BIO INDUSTRY Vol.16, No.11, p.19-26). Full-length cDNA clones are essential for protein expression in functional analyses of genes, and full-length cDNA clones themselves are very important materials for activity measurement. Thus, cloning of full-length cDNA is necessary for functional analyses of genes. Sequencing of the cDNA not only provides important information for establishing the primary sequence of the protein encoded by the cDNA, but also reveals the entire exon sequence. Thus, the full-length cDNA provides valuable information for identifying a gene, such as information for determining the primary sequence of a protein, exon-intron structure, the transcription initiation site of mRNA, the location of a promoter, etc.

[0215] The construction of full-length cDNA libraries by the oligo-capping method can be carried out, for example, according to the method described in “Shin Idenshi Kougaku Handbook (New Genetic Engineering Handbook)”, the third edition (1999), an extra issue of “Jikken Igaku (Experimental Medicine)”, YODOSHA CO., LTD. The reporter gene indicative of the presence of a protein having a function contains one or more suitable expression regulation sequence portion to which a protein factor such as a transcriptional factor can bind, and a structural gene portion which allows the measurement of the activation of the proteins factor The structural gene portion may encode any peptide or protein so long as those skilled in the art can measure the activity or amount of its expression product (including the amount of the mRNA produced). For example, chloramphenicol acetyltransferase, β-galactosidase, luciferase, etc., can be used and their enzymatic activity measured.

[0216] The oligo-capping method involves substituting a cap structure with a synthetic oligo sequence by using BAP, TAP and an RNA ligase, as described in Suzuki & Sugano, “Shin Idenshi Kougaku Handbook (New Genetic Engineering Handbook)”, the third edition (1999), an extra issue of “Jikken Igaku (Experimental Medicine)”, YODOSHA CO., LTD.

[0217] To obtain DNA encoding the protein which promotes STAT6 activation of the present invention, either an in vitro system or a cell-based system, preferably a cell-based system, is used. Examples of such cells include cells of prokaryotes such as E. coli, microorganisms such as yeast and fungi, as well as insects and animals. Preferred examples include animal cells, in particular, 293-EBNA cells and NIH3T3 cells.

[0218] Examples of reporter genes indicative of the presence of a protein having a function include reporter genes containing a CREB (cAMP responsive element binding protein) binding sequence or AP-1 (activator protein-1) binding sequence at the expression regulation sequence region of the reporter genes, in addition to the STAT6 reporter genes described herein. For example, if a gene capable of activating CREB is to be obtained, a CREB-dependent reporter plasmid and a full-length cDNA clone produced by the oligo-capping method can be cotransfected into cells, and a plasmid having increased reporter activity can be selected from the cells to attain the purpose. If a gene capable of inhibiting CREB is to be obtained, a CREB-dependent reporter plasmid and a full-length cDNA clone produced by the oligo-capping method can be cotransfected into cells, and a plasmid having decreased reporter activity can be selected from the cells to attain the purpose. These procedures may be carried out in the presence of a certain stimulus to the cells. The cDNA to be transfected into the cells may be a single clone or multiple clones which may be transfected simultaneously. Alternatively, a screening system for obtaining a gene capable of inhibiting STAT6 activation can also be constructed by cotransfecting a full-length cDNA and a reporter gene into cells) stimulating the cells by IL-4, IL-13 or the like, and selecting a clone having subnormally increased reporter activity.

[0219] Further, because the cDNA of the present invention is full-length, its 5′ end sequence is the transcription initiation site of the corresponding mRNA. Therefore the cDNA sequence can be used to identify the promoter region of the gene by comparing the cDNA with the genomic nucleotide sequence. Genomic nucleotide sequences are available from various databases when the sequences have been deposited in the databases. Alternatively, the cDNA can also be used to clone the desired sequence from a genomic library, for example, by hybridization, and determine its nucleotide sequence. Thus, by comparing the nucleotide sequence of the cDNA of the present invention with a genomic sequence, the promoter region of the gene located upstream the cDNA can be identified. In addition, the promoter fragment thus identified can be used to construct a reporter plasmid for evaluating the expression of the gene. In general, the DNA fragment spanning 2 kb (preferably 1 kb) upstream from the transcription initiation site can be inserted upstream of the reporter gene to produce the reporter plasmid. The reporter plasmid can be used to screen for a compound which enhances or reduces the expression of the gene. For example, such screening can be carried out by transforming a suitable cell with the reporter plasmid, culturing the transformed cell for a certain period of time, adding a certain amount of a test compound, measuring the reporter activity expressed by the cell after a certain period of time, and comparing the activity with that of a cell to which the test compound has not been added. These methods are also included in the scope of the present invention.

[0220] The present invention also relates to a computer-readable medium on which a sequence data set has been stored, said sequence data set comprising at least one nucleotide sequence selected from the group consisting of SEQ ID NOS: 2, 4, 6, 8, 10, 12, 14, 16, 18, 20, 22, 24, 26, 28, 30, 32, 34, 36, 38, 40, 42, 44, 46, 48, 50, 52, 54, 56, 58, 60, 62, 64, 66, 68, 69, 71, 73, 75, 77, 79, 81, 83, 85, 87, 89, 91, 93, 95, 97, 99, 101, 103, 105, 107, 109, 111, 113, 115, 117, 119, 121, 123, 125, 127, 129, 131, 133, 135, 137, 139, 141, 143, 145, 147, 149, 151, 153, 155, 157, 159, 161, 163, 165, 167, 169, 171, 173, 175, 177, 179, 181, 183, 185, 187, 189, 191, 193, 195, 197, 199, 201, 203, 205, 207, 209, 211, 213, 215, 217, 219, 221, 223, 225, 227, 229, 231, 233, 235, 237, 239, 241, 243, 245, 247, 249, 251, 253, 255, 257, 259, 261, 263, 265, 267, 269, 271, 273, 275, 277, 279, 281, 283, 285, 287, 289, 291, 293, 295, 297, 299, 301, 303, 305, 307, 309, 311, 313, 315, 317, 319, 321, 323, 325, 327, 329, 331, 333, 335, 337, 339, 341, 343, 345, 347, 349, 351, 353, 355, 357, 359, 361, 363, 365, 367, 369, 371, 373, 375, 377, 379, 381, 383, 385, 387, 389, 391, 393, 395, 397, 399, 401, 403, 405, 407, 409, 411, 413, 415, 417, 419, 421, 423, 425, 427, 429, 431, 433, 435, 437, 439, 441, 443, 445, 447, 449, 451, 453, 455, 457, 459, 461, 463, 465, 467, 469, 471, 473, 475, 477, 479, 481 and 483 and/or at least one amino acid sequence selected from the group consisting of SEQ ID NOS: 1, 3, 5, 7, 9, 11, 13, 15, 17, 19, 21, 23, 25, 27, 29, 31, 33, 35, 37, 39, 41, 43, 45, 47, 49, 51, 53, 55, 57, 59, 61, 63, 65, 67, 70, 72, 74, 76, 78, 80, 82, 84, 86, 88, 90, 92, 94, 96, 98, 100, 102, 104, 106, 108, 110, 112, 114, 116, 118, 120, 122, 124, 126, 128, 130, 132, 134, 136, 138, 140, 142, 144, 146, 148, 150, 152, 154, 156, 158, 160, 162, 164, 166, 168, 170, 172, 174, 176, 178, 180, 182, 184, 186, 188, 190, 192, 194, 196, 198, 200, 202, 204, 206, 208, 210, 212, 214, 216, 218, 220, 222, 224, 226, 228, 230, 232, 234, 236, 238, 240, 242, 244, 246, 248, 250, 252, 254, 256, 258, 260, 262, 264, 266, 268, 270, 272, 274, 276, 278, 280, 282, 284, 286, 288, 290, 292, 294, 296, 298, 300, 302, 304, 306, 308, 310, 312, 314, 316, 318, 320, 322, 324, 326, 328, 330, 332, 334, 336, 338, 340, 342, 344, 346, 348, 350, 352, 354, 356, 358, 360, 362, 364, 366, 368, 370, 372, 374, 376, 378, 380, 382, 384, 386, 388, 390, 392, 394, 396, 398, 400, 402, 404, 406, 408, 410, 412, 414, 416, 418, 420, 422, 424, 426, 428, 430, 432, 434, 436, 438, 440, 442, 444, 446, 448, 450, 452, 454, 456, 458, 460, 462, 464, 466, 468, 470, 472, 474, 476, 478, 480, 482 and 484.

[0221] In another aspect, the present invention relates to a method for calculating a homology, which comprises comparing data on the above medium with data of other nucleotide sequences. Thus, the polynucleotide and amino acid sequence of the present invention provide valuable information for determining their secondary and tertiary structure, e.g., information for identifying other sequence having a similar function and high homology. These sequences are stored on the computer-readable medium, then a database is searched using data stored in a known macromolecule structure program and a known search tool such as GCG program package (Devereux, J. et al, Nucleic Acids Research 12(1):387 (1984)). In this manner, a sequence in a database having a certain homology can be easily found.

[0222] The computer-readable medium may be any composition of materials used to store information or data. Examples of such media include commercially available floppy disks, tapes, chips, hard disk, compact disks and video disks. The data on the medium allows a method for calculating a homology by comparing the data with other nucleotide sequence data. This method comprises the steps of providing a first polynucleotide sequence containing the polynucleotide sequence of the present invention for the computer-readable medium, and then comparing the first polynucleotide sequence with at least one-second polynucleotide or polypeptide sequence to identify the homology.

[0223] The present invention also relates to an insoluble substrate to which polynucleotide comprising all or part of the nucleotide sequences selected from the group consisting of SEQ ID NOS: 2, 4, 6, 8, 10, 12, 14, 16, 18, 20, 22, 24, 26, 28, 30, 32, 34, 36, 38, 40, 42, 44, 46, 48, 50, 52, 54, 56, 58, 60, 62, 64, 66, 68, 69, 71, 73, 75, 77, 79, 81, 83, 85, 87, 89, 91, 93, 95, 97, 99, 101, 103, 105, 107, 109, 111, 113, 115, 117, 119, 121, 123, 125, 127, 129, 131, 133, 135, 137, 139, 141, 143, 145, 147, 149, 151, 153, 155, 157, 159, 161, 163, 165, 167, 169, 171, 173, 175, 177, 179, 181, 183, 185, 187, 189, 191, 193, 195, 197, 199, 201, 203, 205, 207, 209, 211, 213, 215, 217, 219, 221, 223, 225, 227, 229, 231, 233, 235, 237, 239, 241, 243, 245, 247, 249, 251, 253, 255, 257, 259, 261, 263, 265, 267, 269, 271, 273, 275, 277, 279, 281, 283, 285, 287, 289, 291, 293, 295, 297, 299, 301, 303, 305, 307, 309, 311, 313, 315, 317, 319, 321, 323, 325, 327, 329, 331, 333, 335, 337, 339, 341, 343, 345, 347, 349, 351, 353, 355, 357, 359, 361, 363, 365, 367, 369, 371, 373, 375, 377, 379, 381, 383, 385, 387, 389, 391, 393, 395, 397, 399, 401, 403, 405, 407, 409, 411, 413, 415, 417, 419, 421, 423, 425, 427, 429, 431, 433, 435, 437, 439, 441, 443, 445, 447, 449, 451, 453, 455, 457, 459, 461, 463, 465, 467, 469, 471, 473, 475, 477, 479, 481 and 483 are fixed. A plurality of the various polynucleotides which are DNA probes are fixed on a specifically processed solid substrates such as slide glass to form a DNA microarray and then a labeled target polynucleotide is hybridized with the fixed polynucleotides to detect a signal from each of the probes. The data obtained is analyzed and the gene expression is determined.

[0224] The present invention further relates to an insoluble substrate to which polypeptides comprising all or part of the amino acid sequences of SEQ ID NOS: 1, 3, 5, 7, 9, 11, 13, 15, 17, 19, 21, 23, 25, 27, 29, 31, 33, 35, 37, 39, 41, 43, 45, 47, 49, 51, 53, 55, 57, 59, 61, 63, 65, 67, 70, 72, 74, 76, 78, 80, 82, 84, 86, 88, 90, 92, 94, 96, 98, 100, 102, 104, 106, 108, 110, 112, 114, 116, 118, 120, 122, 124, 126, 128, 130, 132, 134, 136, 138, 140, 142, 144, 146, 148, 150, 152, 154, 156, 158, 160, 162, 164, 166, 168, 170, 172, 174, 176, 178, 180, 182, 184, 186, 188, 190, 192, 194, 196, 198, 200, 202, 204, 206, 208, 210, 212, 214, 216, 218, 220, 222, 224, 226, 228, 230, 232, 234, 236, 238, 240, 242, 244, 246, 248, 250, 252, 254, 256, 258, 260, 262, 264, 266, 268, 270, 272, 274, 276, 278, 280, 282, 284, 286, 288, 290, 292, 294, 296, 298, 300, 302, 304, 306, 308, 310, 312, 314, 316, 318, 320, 322, 324, 326, 328, 330, 332, 334, 336, 338, 340, 342, 344, 346, 348, 350, 352, 354, 356, 358, 360, 362, 364, 366, 368, 370, 372, 374, 376, 378, 380, 382, 384, 386, 388, 390, 392, 394, 396, 398, 400, 402, 404, 406, 408, 410, 412, 414, 416, 418, 420, 422, 424, 426, 428, 430, 432, 434, 436, 438, 440, 442, 444, 446, 448, 450, 452, 454, 456, 458, 460, 462, 464, 466, 468, 470, 472, 474, 476, 478, 480, 482 and 484 are fixed. By mixing organism-derived cell extract with the insoluble substrate on which these proteins are fixed, it is possible to isolate or identify substances captured on the insoluble substrate that can be expected to be useful in diagnosis or drug development.

### EXAMPLES

[0225] The following examples further illustrate, but do not limit the present invention.

### Example 1

[0226] Construction of a Full-length cDNA Library Using the Oligo-capping Method

[0227] (1) Preparation of RNA from Human Lung Fibroblasts (Cryo NHLF)

[0228] Human lung fibroblasts (Cryo NHLF: purchased from Sanko Junyaku Co., Ltd.) were cultured according to the attached protocol. After repeating subculturing the cells to obtain fifty 10 cm dishes containing the resulting culture, the cells were recovered with a cell scraper. Then, total RNA was obtained from the recovered cells by using the RNA extraction reagent ISOGEN (purchased from NIPPON GENE) according to the manufacture's protocol. Then, poly A⁺ RNA was obtained from the total RNA by using an oligo-dT cellulose column according to Maniatis et al., supra.

[0229] (2) Construction of a Full-length cDNA Library by the Oligo-capping Method

[0230] A full-length cDNA library was constructed from the above poly A⁺ RNA by the oligo-capping method according to the method of Sugano S. et al. [e.g., Maruyama, K. & Sugano, S., Gene, 138:171-174 (1994); Suzuki, Y et al., Gene, 200:149-156 (1997); Suzuki, Y. & Sugano, S. “Shin Idenshi Kougaku Handbook (New Genetic Engineering Handbook)”, the third edition (1999), an extra issue of “Jikken Igaku (Experimental Medicine)”, YODOSHA CO., LTD.].

[0231] (3) Preparation of Plasmid DNA

[0232] The full-length cDNA library constructed as above was transfected into E. coli strain TOP 10 by electroporation, then spread on LB agar medium, and incubated overnight at 37° C. Then, using QIAwell 96 Ultra Plasmid Kit (QIAGEN) according to the manufacturer's protocol, the plasmids were recovered from the colonies grown on ampicillin-containing LB agar medium.

### Example 2

[0233] Cloning of DNA Capable of Promoting STAT6 Activation

[0234] (1) Screening of the cDNA Encoding the Protein Capable of Promoting STAT6 Activation

[0235] NIH3T3 cells (purchased from Dainippon Pharmaceutical) were grown to 1×10⁴ cells/well in a 96 well plate for cell culture for 24 hours at 37° C. (in the presence of 5% CO₂) using 10% FBS containing IMDM medium. Then, 100 ng of luciferase reporter plasmid N4×8-luc having a STAT6 response sequence and 2 μl of the full-length cDNA prepared in above Example 1.(3) were cotransfected into the cells in a well using FuGENE 6 (purchased from Roche) according to the manufacturer's protocol. The luciferase reporter plasmid N4×8-luc having the STAT6 response sequence was constructed as follows. With reference to the oligonucleotide sequence to which an activated STAT6 binds specifically, found by Ohmori et al. [J. Immunol. 157, 2058-2065 (1996)], oligonucleotides having the following sequences were synthesized:

(SEQ ID NO:485)
5′-TCGAGCTCTTCTTCCCAGGAACTCAATG-3′,
(SEQ ID NO:486)

5′-TCGACATTGAGTTCCTGGGAAGAAGAGC-3′

[0236] The synthesized oligonucleotides were dissolved in sterile water to be 1μg/μl, respectively, mixed in 10 μl lots, and adjusted the volume to 32 μl with sterile water. The solution was heated for 5 min at 90° C., and gradually cooled down to room temperature to prepare a double-stranded oligonucleotide solution. The solution was reacted with T4 polynucleotide kinase (Takara Shuzo) according to the attached manual, then the reaction product was purified in a usual manner. Separately, SV40 promoter region of pGL3-Promoter vector (Promega) was replaced by the HSV thymidine kinase promoter sequence (from −50 to +10) with Hind III site and BglII site to construct a vector tk-luc. The aforesaid double-stranded oligonucleotide fragments were inserted into the XhoI site of this tk-luc vector using T4 DNA ligase (GIBCO/BRL). The obtained clones were sequenced according to a usual method, and clones in which plural oligonucleotide fragments were inserted were selected. A clone with at most 4 inserted fragments was obtained, which was named as N4×4-luc. The four-interlinked DNA fragments were excised from the N4×4-luc with a XhoI and a BglII site and purified to be inserted into a BamHI and a XhoI site of pBluescript II KS+ (Stratagene). The four-interlinked DNA fragments were excised from this plasmid with KpnI and SpeI and inserted into a KpnI and a NheI site of N4×4-luc plasmid to finally obtain N4×8-luc.

[0237] After transfection, the cells were cultured for 48 hours at 37° C., followed by 6 hours of culture with addition of mouse IL-4 (Immuno-Biological Laboratories) to a final concentration of 0.5 ng/ml. The reporter activity of STAT6 (luciferase activity) was measured using long-term luciferase assay system, PIKKA GENE LT2.0 (TOYO INK) according to the attached manufacturer's instructions. The luciferase activity was measured using Wallac ARVO™ST 1420 MULTILABEL COUNTER (Perkin Elmer).

[0238] (2) DNA Sequencing

[0239] The above screening was carried out for 115, 000 clones, and plasmids showing a 3-fold or more increase in luciferase activity compared to that of the control experiment (luciferase activity of the cell into which vacant vector pME18S-FL3 is introduced instead of full-length cDNA) were selected. One pass sequencing was carried out from the 5′ end of the cloned cDNA (sequencing primer: 5′-CTTCTGCTCTAAAAGCTGCG-3′ (SEQ ID NO: 487)) and from the 3′ end (sequencing primer: 5′-CGACCTGCAGCTCGAGCACA-3′ (SEQ ID NO: 488)) so that as long sequence as possible is determined. The sequencing was carried out using the reagent Thermo Sequenase II Dye Terminator Cycle Sequencing Kit (Amersham Pharmacia Biotech) or BigDye Terminator Cycle Sequencing FS Ready Reaction Kit (Applied Biosystems) and the device ABI PRISM 377 sequencer or ABI PRISM 3100 sequencer according to the manufacturer's instructions.

[0240] (3) Database Analysis of the Obtained Clones

[0241] BLAST (Basic local alignment search tool) searching [S. F. Altschul et al., J. Mol. Biol., 215:403-410 (1990)] was carried out in GenBank for the obtained nucleotide sequence. The results showed that 242 clones represented 112 genes encoding new proteins capable of promoting STAT6 activity.

[0242] (4) Full-length Sequencing

[0243] The full-length DNA sequences for the 242 new clones were determined (SEQ ID NOS: 2, 4, 6, 8, 10, 12, 14, 16, 18, 20, 22, 24, 26, 28, 30, 32, 34, 36, 38, 40, 42, 44, 46, 48, 50, 52, 54, 56, 58, 60, 62, 64, 66, 68, 69, 71, 73, 75, 77, 79, 81, 83, 85, 87, 89, 91, 93, 95, 97, 99, 101, 103, 105, 107, 109, 111, 113, 115, 117, 119, 121, 123, 125, 127, 129, 131, 133, 135, 137, 139, 141, 143, 145, 147, 149, 151, 153, 155, 157, 159, 161, 163, 165, 167, 169, 171, 173, 175, 177, 179, 181, 183, 185, 187, 189, 191, 193, 195, 197, 199, 201, 203, 205, 207, 209, 211, 213, 215, 217, 219, 221, 223, 225, 227, 229, 231, 233, 235, 237, 239, 241, 243, 245, 247, 249, 251, 253, 255, 257, 259, 261, 263, 265, 267, 269, 271, 273, 275, 277, 279, 281, 283, 285, 287, 289, 291, 293, 295, 297, 299, 301, 303, 305, 307, 309, 311, 313, 315, 317, 319, 321, 323, 325, 327, 329, 331, 333, 335, 337, 339, 341, 343, 345, 347, 349, 351, 353, 355, 357, 359, 361, 363, 365, 367, 369, 371, 373, 375, 377, 379, 381, 383, 385, 387, 389, 391, 393, 395, 397, 399, 401, 403, 405, 407, 409, 411, 413, 415, 417, 419, 421, 423, 425, 427, 429, 431, 433, 435, 437, 439, 441, 443, 445, 447, 449, 451, 453, 455, 457, 459, 451, 453, 455, 457, 459, 461, 463, 465, 467, 469, 471, 473, 475, 477, 479, 481 and 483). The amino acid sequences of the protein coding regions (open reading frames) were deduced (SEQ ID NOS: 1, 3, 5, 7, 9, 11, 13, 15, 17, 19, 21, 23, 25, 27, 29, 31, 33, 35, 37, 39, 41, 43, 45, 47, 49, 51, 53, 55, 57, 59, 61, 63, 65, 67, 70, 72, 74, 76, 78, 80, 82, 84, 86, 88, 90, 92, 94, 96, 98, 100, 102, 104, 106, 108, 110, 112, 114, 116, 118, 120, 122, 124, 126, 128, 130, 132, 134, 136, 138, 140, 142, 144, 146, 148, 150, 152, 154, 156, 158, 160, 162, 164, 166, 168, 170, 172, 174, 176, 178, 180, 182, 184, 186, 188, 190, 192, 194, 196, 198, 200, 202, 204, 206, 208, 210, 212, 214, 216, 218, 220, 222, 224, 226, 228, 230, 232, 234, 236, 238, 240, 242, 244, 246, 248, 250, 252, 254, 256, 258, 260, 262, 264, 266, 268, 270, 272, 274, 276, 278, 280, 282, 284, 286, 288, 290, 292, 294, 296, 298, 300, 302, 304, 306, 308, 310, 312, 314, 316, 318, 320, 322, 324, 326, 328, 330, 332, 334, 336, 338, 340, 342, 344, 346, 348, 350, 352, 354, 356, 358, 360, 362, 364, 366, 368, 370, 372, 374, 376, 378, 380, 382, 384, 386, 388, 390, 392, 394, 396, 398, 400, 402, 404, 406, 408, 410, 412, 414, 416, 418, 420, 422, 424, 426, 428, 430, 432, 434, 436, 438, 440, 442, 444, 446, 448, 450, 452, 454, 456, 458, 460, 462, 464, 466, 468, 470, 472, 474, 476, 478, 480, 482 and 484).

[0244] Regarding nucleotide sequences obtained by the above screening, data concerning the luciferase activity of each nucleotide is indicated below. Values for activity are indicated as a ratio of the luciferase activity of cells into which a nucleotide according to each SEQ ID NO. are introduced, divided by luciferase activity of cells into which pME18S-FL3 is introduced. Luciferase activity can be measured in respect of nucleotides according to SEQ ID NOs. not shown in the table, by a similar method.

| SEQ ID NO. (DNA) | Activity *) | SEQ ID NO. (DNA) | Activity *) |
|---|---|---|---|
| 4 | 7.1 | 181 | 4.7 |
| 6 | 127.5 | 183 | 92.3 |
| 8 | 4.2 | 185 | 43.1 |
| 10 | 10.0 | 189 | 3.4 |
| 12 | 9.7 | 193 | 92.5 |
| 14 | 3.5 | 203 | 5.6 |
| 18 | 183.1 | 205 | 3.5 |
| 20 | 50.1 | 207 | 3.0 |
| 26 | 33.5 | 209 | 9.6 |
| 30 | 20.2 | 211 | 5.3 |
| 32 | 5.0 | 217 | 1521.5 |
| 34 | 21.1 | 219 | 12.7 |
| 36 | 21.1 | 223 | 580.4 |
| 38 | 3.1 | 231 | 4.0 |
| 42 | 7.2 | 237 | 105.1 |
| 50 | 18.5 | 241 | 54.3 |
| 56 | 4.7 | 261 | 14.7 |
| 58 | 3.8 | 263 | 12.5 |
| 62 | 20.3 | 273 | 16.6 |
| 64 | 3.2 | 275 | 17.0 |
| 66 | 15.1 | 279 | 28.5 |
| 69 | 11.7 | 281 | 3.9 |
| 71 | 7.9 | 283 | 16.7 |
| 73 | 5.6 | 291 | 13.0 |
| 75 | 3.1 | 293 | 25.8 |
| 77 | 7.1 | 295 | 31.0 |
| 79 | 15.3 | 303 | 22.5 |
| 85 | 11.5 | 317 | 5.1 |
| 87 | 13.1 | 323 | 12.3 |
| 89 | 10.2 | 325 | 6.1 |
| 93 | 5.7 | 327 | 5.3 |
| 95 | 8.9 | 343 | 26.7 |
| 97 | 13.1 | 345 | 3.7 |
| 101 | 8.0 | 349 | 24.3 |
| 105 | 6.3 | 353 | 155.4 |
| 107 | 3.1 | 355 | 66.1 |
| 109 | 7.1 | 357 | 15.6 |
| 111 | 3.7 | 371 | 12.3 |
| 113 | 4.3 | 373 | 10.2 |
| 115 | 8.6 | 375 | 8.9 |
| 117 | 10.1 | 377 | 38.6 |
| 121 | 4.5 | 383 | 34.1 |
| 125 | 9.2 | 397 | 32.6 |
| 127 | 5.0 | 399 | 10.5 |
| 129 | 14.8 | 413 | 3.4 |
| 131 | 13.5 | 415 | 18.4 |
| 133 | 12.7 | 417 | 13.4 |
| 137 | 20.3 | 423 | 4.8 |
| 139 | 4.1 | 425 | 11.4 |
| 141 | 11.7 | 429 | 3.2 |
| 149 | 9.9 | 431 | 3.8 |
| 151 | 104.7 | 433 | 8.8 |
| 159 | 19.1 | 435 | 5.1 |
| 163 | 3.5 | 441 | 4.5 |
| 165 | 3.5 | 455 | 3.3 |
| 167 | 3.0 | 465 | 13.3 |
| 171 | 4.8 | 469 | 6.5 |
| 175 | 17.7 | 471 | 147.7 |
| 177 | 22.6 | 481 | 6.4 |

Activity = (luciferase activity of the gene of each SEQ ID NO:)/(luciferase activity of pME18S-FL3)

### Example 3

[0245] Screening Compounds Inhibiting Promotion of STAT6 Activity

[0246] NIH3T3 cells were seeded on 10% FBS containing IMDM medium in a 96-well cell culture plate to a final cell density of 1×10⁴ cells/100 μl/well, and cultured for 24 hours at 37° C. in the presence of 5% CO₂. Then, 30 ng of the plasmid containing the nucleotide encoding the STAT6 activation-promoting protein of SEQ ID NO: 3, 17, 19, 218, 432 or 472, or the nucleotide of SEQ ID NO: 64, and 100 ng of the luciferase reporter plasmid having the STAT6 response sequence were cotransfected into the cells in a well using FuGENE 6. After 48 hours, AG18, AG490, or staurosporin (purchased form CALBIOCHEM) known to be a protein kinase inhibitor was added to the culture to a final concentration of 20 μM, 20 μM, 30 μM, respectively. After 30 min of culture at 37° C., followed by 6 hours of culture with addition of mouse IL-4 to a final concentration of 1 ng/ml, the reporter activity was measured using PIKKA GENE LT2.0. The results showed that the AG18, AG490, and staurosporin inhibited the expression of the reporter gene in the well in which the plasmid containing a nucleotide encoding the STAT6 activation-promoting protein of SEQ ID NO: 3, 17, 19, 218, 432 or 472, or nucleotide according to SEQ ID NO: 64 was introduced while no expression was inhibited at all in the well in which a control plasmid pcDNA3.1 (+) (Invitrogen) was introduced (FIGS. 1 to 7).

[0247] Similarly, control of expression of a reporter gene can be confirmed in respect of genes coding for other amino acid sequences by a similar method.

### INDUSTRIAL APPLICABILITY

[0248] As described above, the present invention provides industrially highly useful proteins capable of promoting STAT6 activity and genes encoding the proteins. The proteins of the present invention and the genes encoding the proteins allow not only screening for compounds useful for treating and preventing diseases associated with the excessive activation or inhibition of STAT6, but also production of diagnostics for such diseases. The genes of the present invention are also useful as a gene source used for gene therapy.

[0249] All publications, patents and patent applications cited herein are incorporated herein in their entirety.

1. A purified protein selected from the group comprising of:
(a) a protein which consists of an amino acid sequence selected from the group consisting of SEQ ID NOS: 1, 3, 5, 7, 9, 11, 13, 15, 17, 19, 21, 23, 25, 27, 29, 31, 33, 35, 37, 39, 41, 43, 45, 47, 49, 51, 53, 55, 57, 59, 61, 63, 65, 67, 70, 72, 74, 76, 78, 80, 82, 84, 86, 88, 90, 92, 94, 96, 98, 100, 102, 104, 106, 108, 110, 112, 114, 116, 118, 120, 122, 124, 126, 128, 130, 132, 134, 136, 138, 140, 142, 144, 146, 148, 150, 152, 154, 156, 158, 160, 162, 164, 166, 168, 170, 172, 174, 176, 178, 180, 182, 184, 186, 188, 190, 192, 194, 196, 198, 200, 202, 204, 206, 208, 210, 212, 214, 216, 218, 220, 222, 224, 226, 228, 230, 232, 234, 236, 238, 240, 242, 244, 246, 248, 250, 252, 254, 256, 258, 260, 262, 264, 266, 268, 270, 272, 274, 276, 278, 280, 282, 284, 286, 288, 290, 292, 294, 296, 298, 300, 302, 304, 306, 308, 310, 312, 314, 316, 318, 320, 322, 324, 326, 328, 330, 332, 334, 336, 338, 340, 342, 344, 346, 348, 350, 352, 354, 356, 358, 360, 362, 364, 366, 368, 370, 372, 374, 376, 378, 380, 382, 384, 386, 388, 390, 392, 394, 396, 398, 400, 402, 404, 406, 408, 410, 412, 414, 416, 418, 420, 422, 424, 426, 428, 430, 432, 434, 436, 438, 440, 442, 444, 446, 448, 450, 452, 454, 456, 458, 460, 462, 464, 466, 468, 470, 472, 474, 476, 478, 480, 482 and 484; and
(b) a protein that promotes STAT6 activation and consists of an amino acid sequence having at least one amino acid deletion, substitution or addition in an amino acid sequence selected from the group consisting of SEQ ID NOS: 1, 3, 5, 7, 9, 11, 13, 15, 17, 19, 21, 23, 25, 27, 29, 31, 33, 35, 37, 39, 41, 43, 45, 47, 49, 51, 53, 55, 57, 59, 61, 63, 65, 67, 70, 72, 74, 76, 78, 80, 82, 84, 86, 88, 90, 92, 94, 96, 98, 100, 102, 104, 106, 108, 110, 112, 114, 116, 118, 120, 122, 124, 126, 128, 130, 132, 134, 136, 138, 140, 142, 144, 146, 148, 150, 152, 154, 156, 158, 160, 162, 164, 166, 168, 170, 172, 174, 176, 178, 180, 182, 184, 186, 188, 190, 192, 194, 196, 198, 200, 202, 204, 206, 208, 210, 212, 214, 216, 218, 220, 222, 224, 226, 228, 230, 232, 234, 236, 238, 240, 242, 244, 246, 248, 250, 252, 254, 256, 258, 260, 262, 264, 266, 268, 270, 272, 274, 276, 278, 280, 282, 284, 286, 288, 290, 292, 294, 296, 298, 300, 302, 304, 306, 308, 310, 312, 314, 316, 318, 320, 322, 324, 326, 328, 330, 332, 334, 336, 338, 340, 342, 344, 346, 348, 350, 352, 354, 356, 358, 360, 362, 364, 366, 368, 370, 372, 374, 376, 378, 380, 382, 384, 386, 388, 390, 392, 394, 396, 398, 400, 402, 404, 406, 408, 410, 412, 414, 416, 418, 420, 422, 424, 426, 428, 430, 432, 434, 436, 438, 440, 442, 444, 446, 448, 450, 452, 454, 456, 458, 460, 462, 464, 466, 468, 470, 472, 474, 476, 478, 480, 482, and 484.

2. A purified protein that promotes STAT6 activation and comprises an amino acid sequence having at least 95% identity to the protein according to claim 1 over the entire length thereof.

3. An isolated polynucleotide which comprises a nucleotide sequence encoding a protein selected from the group consisting of:
(a) a protein which comprises an amino acid sequence selected from the group consisting of SEQ ID NOS: 1, 3, 5, 7, 9, 11, 13, 15, 17, 19, 21, 23, 25, 27, 29, 31, 33, 35, 37, 39, 41, 43, 45, 47, 49, 51, 53, 55, 57, 59, 61, 63, 65, 67, 70, 72, 74, 76, 78, 80, 82, 84, 86, 88, 90, 92, 94, 96, 98, 100, 102, 104, 106, 108, 110, 112, 114, 116, 118, 120, 122, 124, 126, 128, 130, 132, 134, 136, 138, 140, 142, 144, 146, 148, 150, 152, 154, 156, 158, 160, 162, 164, 166, 168, 170, 172, 174, 176, 178, 180, 182, 184, 186, 188, 190, 192, 194, 196, 198, 200, 202, 204, 206, 208, 210, 212, 214, 216, 218, 220, 222, 224, 226, 228, 230, 232, 234, 236, 238, 240, 242, 244, 246, 248, 250, 252, 254, 256, 258, 260, 262, 264, 266, 268, 270, 272, 274, 276, 278, 280, 282, 284, 286, 288, 290, 292, 294, 296, 298, 300, 302, 304, 306, 308, 310, 312, 314, 316, 318, 320, 322, 324, 326, 328, 330, 332, 334, 336, 338, 340, 342, 344, 346, 348, 350, 352, 354, 356, 358, 360, 362, 364, 366, 368, 370, 372, 374, 376, 378, 380, 382, 384, 386, 388, 390, 392, 394, 396, 398, 400, 402, 404, 406, 408, 410, 412, 414, 416, 418, 420, 422, 424, 426, 428, 430, 432, 434, 436, 438, 440, 442, 444, 446, 448, 450, 452, 454, 456, 458, 460, 462, 464, 466, 468, 470, 472, 474, 476, 478, 480, 482 and 484; and
(b) a protein that promotes STAT6 activation and consists of an amino acid sequence having at least one amino acid deletion, substitution or addition in an amino acid sequence selected from the group consisting of SEQ ID NOS: 1, 3, 5, 7, 9, 11, 13, 15, 17, 19, 21, 23, 25, 27, 29, 31, 33, 35, 37, 39, 41, 43, 45, 47, 49, 51, 53, 55, 57, 59, 61, 63, 65, 67, 70, 72, 74, 76, 78, 80, 82, 84, 86, 88, 90, 92, 94, 96, 98, 100, 102, 104, 106, 108, 110, 112, 114, 116, 118, 120, 122, 124, 126, 128, 130, 132, 134, 136, 138, 140, 142, 144, 146, 148, 150, 152, 154, 156, 158, 160, 162, 164, 166, 168, 170, 172, 174, 176, 178, 180, 182, 184, 186, 188, 190, 192, 194, 196, 198, 200, 202, 204, 206, 208, 210, 212, 214, 216, 218, 220, 222, 224, 226, 228, 230, 232, 234, 236, 238, 240, 242, 244, 246, 248, 250, 252, 254, 256, 258, 260, 262, 264, 266, 268, 270, 272, 274, 276, 278, 280, 282, 284, 286, 288, 290, 292, 294, 296, 298, 300, 302, 304, 306, 308, 310, 312, 314, 316, 318, 320, 322, 324, 326, 328, 330, 332, 334, 336, 338, 340, 342, 344, 346, 348, 350, 352, 354, 356, 358, 360, 362, 364, 366, 368, 370, 372, 374, 376, 378, 380, 382, 384, 386, 388, 390, 392, 394, 396, 398, 400, 402, 404, 406, 408, 410, 412, 414, 416, 418, 420, 422, 424, 426, 428, 430, 432, 434, 436, 438, 440, 442, 444, 446, 448, 450, 452, 454, 456, 458, 460, 462, 464, 466, 468, 470, 472, 474, 476, 478, 480, 482 and 484.

4. An isolated polynucleotide comprising a polynucleotide sequence selected from the group consisting of:
(a) a polynucleotide sequence represented by any one of SEQ ID NOS: 2, 4, 6, 8, 10, 12, 14, 16, 18, 20, 22, 24, 26, 28, 30, 32, 34, 36, 38, 40, 42, 44, 46, 48, 50, 52, 54, 56, 58, 60, 62, 64, 66, 68, 69, 71, 73, 75, 77, 79, 81, 83, 85, 87, 89, 91, 93, 95, 97, 99, 101, 103, 105, 107, 109, 111, 113, 115, 117, 119, 121, 123, 125, 127, 129, 131, 133, 135, 137, 139, 141, 143, 145, 147, 149, 151, 153, 155, 157, 159, 161, 163, 165, 167, 169, 171, 173, 175, 177, 179, 181, 183, 185, 187, 189, 191, 193, 195, 197, 199, 201, 203, 205, 207, 209, 211, 213, 215, 217, 219, 221, 223, 225, 227, 229, 231, 233, 235, 237, 239, 241, 243, 245, 247, 249, 251, 253, 255, 257, 259, 261, 263, 265, 267, 269, 271, 273, 275, 277, 279, 281, 283, 285, 287, 289, 291, 293, 295, 297, 299, 301, 303, 305, 307, 309, 311, 313, 315, 317, 319, 321, 323, 325, 327, 329, 331, 333, 335, 337, 339, 341, 343, 345, 347, 349, 351, 353, 355, 357, 359, 361, 363, 365, 367, 369, 371, 373, 375, 377, 379, 381, 383, 385, 387, 389, 391, 393, 395, 397, 399, 401, 403, 405, 407, 409, 411, 413, 415, 417, 419, 421, 423, 425, 427, 429, 431, 433, 435, 437, 439, 441, 443, 445, 447, 449, 451, 453, 455, 457, 459, 461, 463, 465, 467, 469, 471, 473, 475, 477, 479, 481 and 483; and a polynucleotide sequence complementary to said polynucleotide;
(b) a polynucleotide sequence encoding a protein that promotes STAT6 activation and hybridizing with a polynucleotide having any one of the polynucleotide sequences of (a) under stringent conditions; and
(c) a polynucleotide sequence which encodes a protein that promotes STAT6 activation, and which consists of a polynucleotide sequence having at least one nucleotide deletion, substitution or addition in a polynucleotide sequence selected from the group consisting of SEQ ID NOS: 2, 4, 6, 8, 10, 12, 14, 16, 18, 20, 22, 24, 26, 28, 30, 32, 34, 36, 38, 40, 42, 44, 46, 48, 50, 52, 54, 56, 58, 60, 62, 64, 66, 68, 69, 71, 73, 75, 77, 79, 81, 83, 85, 87, 89, 91, 93, 95, 97, 99, 101, 103, 105, 107, 109, 111, 113, 115, 117, 119, 121, 123, 125, 127, 129, 131, 133, 135, 137, 139, 141, 143, 145, 147, 149, 151, 153, 155, 157, 159, 161, 163, 165, 167, 169, 171, 173, 175, 177, 179, 181, 183, 185, 187, 189, 191, 193, 195, 197, 199, 201, 203, 205, 207, 209, 211, 213, 215, 217, 219, 221, 223, 225, 227, 229, 231, 233, 235, 237, 239, 241, 243, 245, 247, 249, 251, 253, 255, 257, 259, 261, 263, 265, 267, 269, 271, 273, 275, 277, 279, 281, 283, 285, 287, 289, 291, 293, 295, 297, 299, 301, 303, 305, 307, 309, 311, 313, 315, 317, 319, 321, 323, 325, 327, 329, 331, 333, 335, 337, 339, 341, 343, 345, 347, 349, 351, 353, 355, 357, 359, 361, 363, 365, 367, 369, 371, 373, 375, 377, 379, 381, 383, 385, 387, 389, 391, 393, 395, 397, 399, 401, 403, 405, 407, 409, 411, 413, 415, 417, 419, 421, 423, 425, 427, 429, 431, 433, 435, 437, 439, 441, 443, 445, 447, 449, 451, 453, 455, 457, 459, 461, 463, 465, 467, 469, 471, 473, 475, 477, 479, 481 and 483.

5. An isolated polynucleotide comprising a nucleotide sequence which encodes a protein that promotes STAT6 activation and has at least 95% identity to any one of the polynucleotide sequences according to claim 3 over the entire length thereof.

6. An isolated polynucleotide comprising a nucleotide sequence which encodes a protein that promotes STAT6 activation and has at least 95% identity to any one of the polynucleotide sequences according to claim 4 over the entire length thereof.

7. A purified protein encoded by the polynucleotide according to any one of claims 3 to 6.

8. A recombinant vector which comprises a polynucleotide according to any one of claims 3 to 6.

9. A transformed cell which comprises the recombinant vector according to claim 8.

10. A membrane of the cell according to claim 9, when the protein according to claim 1 or 2 is a membrane protein.

11. A process for producing a protein comprising,
(a) culturing a transformed cell comprising any one of the isolated polynucleotides according to any one of claims 3 to 6 under conditions providing expression of the encoded protein; and
(b) recovering the protein from the culture.

12. A process for diagnosing a disease or susceptibility to a disease in a subject related to expression or activity of the protein of claim 1, 2 or 7 in a subject comprising:
(a) determining the presence or absence of a mutation in the nucleotide sequence encoding said protein in the genome of said subject; and/or
(b) analyzing the amount of expression of said protein in a sample derived from said subject, wherein a diagnosis of disease is made according to an increase or decrease in the amount of the protein expressed.

13. A method for screening compounds for activity as inhibitors or activators of STAT6, which comprises the steps of:
(a) providing a cell with a gene encoding a protein that promotes STAT6 activation, and a component that provides a detectable signal associated with activation of STAT6;
(b) culturing a transformed cell under conditions, which permit the expression of the gene in the transformed cell;
(c) contacting the transformed cell with one or more compounds; and
(d) measuring the detectable signal; and
(e) isolating or identifying as an activator compound and/or an inhibitor compound according to said detectable signal.

14. A process for producing a pharmaceutical composition, which comprises the steps of:
(a) providing a cell with a gene encoding a protein that promotes STAT6 activation, and a component capable of providing a detectable signal;
(b) culturing the transformed cell under conditions, which permit the expression of the gene in the transformed cell;
(c) contacting the transformed cell with one or more compounds;
(d) measuring the detectable signal;
(e) isolating or identifying as an activator compound and/or an inhibitor compound according to said detectable signal; and
(f) optimizing the isolated or identified compound as a pharmaceutical composition.

15. A kit for screening a compound for activity as an inhibitor or activator of STAT6, which comprises:
(a) a cell comprising a gene encoding a protein that promotes STAT6 activation, and a component that provides a detectable signal upon activation of STAT6; and
(b) reagents for measuring the detectable signal.

16. A monoclonal or polyclonal antibody that reacts with the protein according to claim 1, 2 or 7.

17. A process for producing a monoclonal or polyclonal antibody that reacts with the protein of claim 1, 2 or 7, which comprises administering the protein according to claim 1, 2 or 7, or epitope-bearing fragments thereof to a non-human animal.

18. An antisense oligonucleotide complementary to the polynucleotide according to any one of claims 3 to 6, which prevents expression of a protein that promotes STAT6 activation.

19. A ribozyme which inhibits STAT6 activation by cleavage of RNA that encodes the protein of claim 1, 2 or 7, or by cleavage of RNA that encodes some protein of the pathway that leads to STAT6 activation.

20. A method for treating a disease, which comprises administering to a subject an amount of a compound screened by the process according to claim 13, and/or a monoclonal or polyclonal antibody according to clam 16, and/or an antisense oligonucleotide according to claim 18 and/or a ribozyme according to claim 19 effective to treat a disease selected from the group consisting of allergic disease, inflammation, autoimmune diseases, diabetes, hyperlipidemia, infectious disease and cancers.

21. A pharmaceutical composition produced according to claim 14 as inhibiting or activating STAT6 activation.

22. A pharmaceutical composition according to claim 21 for the treatment of allergic disease, inflammation, autoimmune diseases, diabetes, hyperlipidemia, infectious disease and cancers.

23. A method of treating allergic disease, inflammation, autoimmune diseases, diabetes, hyperlipidemia, infectious disease and cancers, which comprising administering a pharmaceutical composition produced according to claim 14 to a patient suffering from a disease related to STAT6 activation.

24. A pharmaceutical composition according to claim 21 for the treatment of Th1 hyperactive diseases.

25. A method of treating Th1 hyperactive diseases, which comprises administering a pharmaceutical composition produced according to claim 14 to a patient suffering from a disease related to inhibition of STAT6 activation.

26. A pharmaceutical composition which comprises a monoclonal or polyclonal antibody according to claim 16 as an active ingredient.

27. A pharmaceutical composition which comprises an antisense oligonucleotide according to claim 18 as an active ingredient.

28. The pharmaceutical composition according to claim 26 or 27, wherein the target disease is selected from the group consisting of allergic disease, inflammation, autoimmune diseases, diabetes, hyperlipidemia, infectious diseases and cancers.

29. A computer-readable medium on which a sequence data set has been stored, said sequence data set comprising at least one nucleotide sequence selected from the group consisting of SEQ ID NOS: 2, 4, 6, 8, 10, 12, 14, 16, 18, 20, 22, 24, 26, 28, 30, 32, 34, 36, 38, 40, 42, 44, 46, 48, 50, 52, 54, 56, 58, 60, 62, 64, 66, 68, 69, 71, 73, 75, 77, 79, 81, 83, 85, 87, 89, 91, 93, 95, 97, 99, 101, 103, 105, 107, 109, 111, 113, 115, 117, 119, 121, 123, 125, 127, 129, 131, 133, 135, 137, 139, 141, 143, 145, 147, 149, 151, 153, 155, 157, 159, 161, 163, 165, 167, 169, 171, 173, 175, 177, 179, 181, 183, 185, 187, 189, 191, 193, 195, 197, 199, 201, 203, 205, 207, 209, 211, 213, 215, 217, 219, 221, 223, 225, 227, 229, 231, 233, 235, 237, 239, 241, 243, 245, 247, 249, 251, 253, 255, 257, 259, 261, 263, 265, 267, 269, 271, 273, 275, 277, 279, 281, 283, 285, 287, 289, 291, 293, 295, 297, 299, 301, 303, 305, 307, 309, 311, 313, 315, 317, 319, 321, 323, 325, 327, 329, 331, 333, 335, 337, 339, 341, 343, 345, 347, 349, 351, 353, 355, 357, 359, 361, 363, 365, 367, 369, 371, 373, 375, 377, 379, 381, 383, 385, 387, 389, 391, 393, 395, 397, 399, 401, 403, 405, 407, 409, 411, 413, 415, 417, 419, 421, 423, 425, 427, 429, 431, 433, 435, 437, 439, 441, 443, 445, 447, 449, 451, 453, 455, 457, 459, 461, 463, 465, 467, 469, 471, 473, 475, 477, 479, 481 and 483 and/or at least one amino acid sequence selected from the group consisting of SEQ ID NOS: 1, 3, 5, 7, 9, 11, 13, 15, 17, 19, 21, 23, 25, 27, 29, 31, 33, 35, 37, 39, 41, 43, 45, 47, 49, 51, 53, 55, 57, 59, 61, 63, 65, 67, 70, 72, 74, 76, 78, 80, 82, 84, 86, 88, 90, 92, 94, 96, 98, 100, 102, 104, 106, 108, 110, 112, 114, 116, 118, 120, 122, 124, 126, 128, 130, 132, 134, 136, 138, 140, 142, 144, 146, 148, 150, 152, 154, 156, 158, 160, 162, 164, 166, 168, 170, 172, 174, 176, 178, 180, 182, 184, 186, 188, 190, 192, 194, 196, 198, 200, 202, 204, 206, 208, 210, 212, 214, 216, 218, 220, 222, 224, 226, 228, 230, 232, 234, 236, 238, 240, 242, 244, 246, 248, 250, 252, 254, 256, 258, 260, 262, 264, 266, 268, 270, 272, 274, 276, 278, 280, 282, 284, 286, 288, 290, 292, 294, 296, 298, 300, 302, 304, 306, 308, 310, 312, 314, 316, 318, 320, 322, 324, 326, 328, 330, 332, 334, 336, 338, 340, 342, 344, 346, 348, 350, 352, 354, 356, 358, 360, 362, 364, 366, 368, 370, 372, 374, 376, 378, 380, 382, 384, 386, 388, 390, 392, 394, 396, 398, 400, 402, 404, 406, 408, 410, 412, 414, 416, 418, 420, 422, 424, 426, 428, 430, 432, 434, 436, 438, 440, 442, 444, 446, 448, 450, 452, 454, 456, 458, 460, 462, 464, 466, 468, 470, 472, 474, 476, 478, 480, 482 and 484.

30. A method for calculating identity to other nucleotide sequences and/or amino acid sequences, which comprises comparing data on a medium according to claim 29 with data of said other nucleotide sequences and/or amino acid sequences.

31. An insoluble substrate to which polynucleotide comprising all or part of the nucleotide sequences selected from the group consisting of SEQ ID NOS: 2, 4, 6, 8, 10, 12, 14, 16, 18, 20, 22, 24, 26, 28, 30, 32, 34, 36, 38, 40, 42, 44, 46, 48, 50, 52, 54, 56, 58, 60, 62, 64, 66, 68, 69, 71, 73, 75, 77, 79, 81, 83, 85, 87, 89, 91, 93, 95, 97, 99, 101, 103, 105, 107, 109, 111, 113, 115, 117, 119, 121, 123, 125, 127, 129, 131, 133, 135, 137, 139, 141, 143, 145, 147, 149, 151, 153, 155, 157, 159, 161, 163, 165, 167, 169, 171, 173, 175, 177, 179, 181, 183, 185, 187, 189, 191, 193, 195, 197, 199, 201, 203, 205, 207, 209, 211, 213, 215, 217, 219, 221, 223, 225, 227, 229, 231, 233, 235, 237, 239, 241, 243, 245, 247, 249, 251, 253, 255, 257, 259, 261, 263, 265, 267, 269, 271, 273, 275, 277, 279, 281, 283, 285, 287, 289, 291, 293, 295, 297, 299, 301, 303, 305, 307, 309, 311, 313, 315, 317, 319, 321, 323, 325, 327, 329, 331, 333, 335, 337, 339, 341, 343, 345, 347, 349, 351, 353, 355, 357, 359, 361, 363, 365, 367, 369, 371, 373, 375, 377, 379, 381, 383, 385, 387, 389, 391, 393, 395, 397, 399, 401, 403, 405, 407, 409, 411, 413, 415, 417, 419, 421, 423, 425, 427, 429, 431, 433, 435, 437, 439, 441, 443, 445, 447, 449, 451, 453, 455, 457, 459, 461, 463, 465, 467, 469, 471, 473, 475, 477, 479, 481 and 483 are fixed.

32. An insoluble substrate to which polypeptides comprising all or a part of the amino acid sequences selected from the group consisting of SEQ ID NOS: 1, 3, 5, 7, 9, 11, 13, 15, 17, 19, 21 23, 25, 27, 29, 31, 33, 35 37 39 41 43 45, 47, 49, 51, 53, 55, 57, 59, 61, 63, 65, 67, 70, 72, 74, 76, 78, 80, 82, 84, 86, 88, 90, 92, 94, 96, 98, 100, 102, 104, 106, 108, 110, 112, 114, 116, 118, 120, 122, 124, 126, 128, 130, 132, 134, 136, 138, 140, 142, 144, 146, 148, 150, 152, 154, 156, 158, 160, 162, 164, 166, 168, 170, 172, 174, 176, 178, 180, 182, 184, 186, 188, 190, 192, 194, 196, 198, 200, 202, 204, 206, 208, 210, 212, 214, 216, 218, 220, 222, 224, 226, 228, 230, 232, 234, 236, 238, 240, 242, 244, 246, 248, 250, 252, 254, 256, 258, 260, 262, 264, 266, 268, 270, 272, 274, 276, 278, 280, 282, 284, 286, 288, 290, 292, 294, 296, 298, 300, 302, 304, 306, 308, 310, 312, 314, 316, 318, 320, 322, 324, 326, 328, 330, 332, 334, 336, 338, 340, 342, 344, 346, 348, 350, 352, 354, 356, 358, 360, 362, 364, 366, 368, 370, 372, 374, 376, 378, 380, 382, 384, 386, 388, 390, 392, 394, 396, 398, 400, 402, 404, 406, 408, 410, 412, 414, 416, 418, 420, 422, 424, 426, 428, 430, 432, 434, 436, 438, 440, 442, 444, 446, 448, 450, 452, 454, 456, 458, 460, 462, 464, 466, 468, 470, 472, 474, 476, 478, 480, 482 and 484 are fixed.

The application's sequence listing, which the Patent Office published only in electronic form, follows.

SEQUENCE LISTING (488 sequences)

SEQ ID NO: 1 - protein, 197 aa, Homo sapiens
MVGQPQPRDDVGSPRPRVIVGTIRPRVIVGTIRPRVIVGSARARPPPDGTPRPQLAAEESPRPRVIFGTPRARVILGSPRPRVIVSSPWPAVVVASPRPRTPVGSPWPRVVVGTPRPRVIVGSPRARVADADPASAPSQGALQGRRQDEHSGTRAEGSRPGGAAPVPEEGGRFARAQRLPPPRHLRLPGAPDRHRGI

SEQ ID NO: 2 - DNA, 1708 bp, Homo sapiens
  CDS (129)..(719)
tcgaggccctgtagccggactgggcccctcgccccctcctccagcggcctgcgggccttggcagcgccgcccctgcccacactgaccccgtgtggcggggccgctccgcgcccccgggccgctctgtaatggtagggcagcctcagccccgagatgacgtcgggtctccgcggccccgggttattgtaggaaccatccggccccgcgtaatcgtaggaactatccggccccgcgtaatcgtagggtctgcgcgggcccggcccccaccagacgggactccccgcccccaattggcggccgaagagtctcctcgccccagagtcatcttcgggacgcccagggcccgggtgattttgggctcgccgcggccccgggtgattgtttcatctccgtggcccgcggtggtcgtagcgtctccgagaccgcggactcccgtagggtccccgtggccccgagttgtagtcgggacaccccggccgcgggtgatcgtcgggtctccacgcgcccgggtcgctgacgcggatccggcctcggcgccttctcagggcgccctgcaaggccgcaggcaggatgaacattctggcacccgtgcggagggatcgcgtcctggcggagctgccccagtgcctgaggaaggaggccgctttgcacgggcacaaagacttccacccccgcgtcacctgcgcctgccaggagcaccggacaggcaccgtgggatttaagatctccaaggtcattgtggtgggggacctgtcggtggggaagacttgcctcattaataggttctgcaaagacacctttgataagaattacaaggccaccattggagtggacttcgagatggaacgatttgaggtgctgggcattcccttcagtttgcagctttgggataccgctgggcaggagaggttcaaatgcattgcatcaacctactatagaggagctcaagccatcatcattgtcttcaacctgaatgatgtggcatctctggaacataccaagcagtggctggccgatgccctgaaggagaatgacccttccagtgtgcttctcttccttgtaggttccaagaaggatctgagtacccctgctcagtatgcgctgatggagaaagacgccctccaggtggcccaggagatgaaggctgagtactgggcagtctcatctctcactggtgagaatgtccgagaattcttcttccgtgtggcagcactgacctttgaggccaatgtgctggctgagctggagaaatcgggggctcgacgcattggggatgttgtccgcatcaacagtgatgacagcaacctctacctaactgccagcaagaagaagcccacatgttgcccatgagggctgaggagactgttcagagactgcccagccctagggcactgtgccaccctcattcctccagagcttgacccctggacatttgcactgactttatccagaccaaagagctgcctcttggtggcagtattcccacagaggggtagctgggatcatgctagtcacttcctgcccccaggcaccgtgccaaagactggatgccccctactcctcaggggactgtccagggcgcccagtggtagtgagggagagtgtctctgttcttttgctcagcctgctgggccctttgtgtttgaggatgcttaatgattccagcctctcactgtgccttatgcattaaaatttctttgttacgagc

SEQ ID NO: 3 - protein, 259 aa, Homo sapiens
MNILAPVRRDRVLAELPQCLRKEAALHGHKDFHPRVTCACQEHRTGTVGFKISKVIVVGDLSVGKTCLINRFCKDTFDKNYKATIGVDFEMERFEVLGIPFSLQLWDTAGQERFKCIASTYYRGAQAIIIVFNLNDVASLEHTKQWLADALKENDPSSVLLFLVGSKKDLSTPAQYALMEKDALQVAQEMKAEYWAVSSLTGENVREFFFRVAALTFEANVLAELEKSGARRIGDVVRINSDDSNLYLTASKKKPTCCP

SEQ ID NO: 4 - DNA, 1708 bp, Homo sapiens; identical to SEQ ID NO: 2
  CDS (571)..(1347)

SEQ ID NO: 5 - protein, 63 aa, Homo sapiens [sequence omitted]

SEQ ID NO: 6 - DNA, 1364 bp, Homo sapiens
  CDS (379)..(567)
taaaagaagagaagaggctaaagaagaaaagaagaaaatcaacttcttcttcaagtgtttcttctgctgatgaatcagtgtcttcatcatcatcctcttcctcttctggtcacaaaaggcataagaaacataagaggaaccgttcagagtcttctcgcagttccagaaggcattcatctagggcatcctcaaatcagatagatcagaataggaaagatgagtgctacccagttccagctaatacttcagcatcttttcttaaccataaacaagaagtggagaaactactggggaagcaggataggttacagtatgaaaagacacagataaaagagaaagatagatgccctctctcttcatcttcacttgaaataccggatgattttggaggtaggtctgaagatccaagagatttttataacagctataaaacccaagcaggtagtagcaaaacagaaaagccatataaatcagaaagacatttttccagtagaagaaattcctcagattccttctgtaggaattcagaggacaagatttatggttataggagatttgaaaaggatatagagggaagaaaagagcactatagaaggtgggaaccaggttctgtgaggcattctacctcaccagcaagctcagaatactcttggaagtcagttgagaaatacaaaaaatacgctcactctggatcacgtgatttcagtagacatgagcaaagataccgtttaaatacaaatcaaggagaatatgaaagagaggacaattatggggaggatatcaaaacagaggttccagaagaagatgcactaagtagcaaagaacactcagaaagcagtgttaagaaaaatttacctcagaatttactgaatatatttaatcagatagctgaatttgaaaaagaaaaaggaaataagtcaaaaaattaatacaccaaggatatcggcaccattacacaaaatgccattaagtgaagtttttggttgtattagtcataacagttgagtgcagaaatctctgcttctaaaattatttgtagagattacaggaaacaaatgcttttaagtaagtttttctcaaattttgtttcagttctaggtcccttgtcacagcttggtttttagactttttatgtatatgtttatgtacagtatattactcttgacagtttgaatttcttcacctaaagataattctctgaaagtactgtttcttcattctattgcggtatatgagaattcctgggtgcatcttattctgctgtttgagagaaaaatttgtgcattgaacacttggatcatttttataaaaattaatttcattttcttttctgttaaattaaaaatcgtcagcttttgaaagat

SEQ ID NO: 7 - protein, 770 aa, Homo sapiens
MDRDLLRQSLNCHGSSLLSLLRSEQQDNPHFRSLLGSAAEPARGPPPQHPLQGRKEKRVDNIEIQKFISKKADLLFALSWKSDAPATSEINEDSEDHYAIMPPLEQFMEIPSMDRRELFFRDIERGDIVIGRISSIREFGFFMVLICLGSGIMRDIAHLEITALCPLRDVPSHSNHGDPLSYYQTGDIIRAGIKDIDRYHEKLAVSLYSSSLPPHLSGIKLGVISSEELPLYYRRSVELNSNSLESYENVMQSSLGFVNPGVVEFLLEKLGIDESNPPSLMRGLQSKNFSEDDFASALRKKQSASWALKCVKIGVDYFKVGRHVDAMNEYNKALEIDKQNVEALVARGALYATKGSFEQSNRRFELALENCPTHRNARKYLCQTLVERGGQLEEEEKFLNAESYYKKALALDETFKDAEDALQKLHKYMQKSLELREKQAEKEEKQKTKKIETSAEKLRKLLKEEKRLKKKRRKSTSSSSVSSADESVSSSSSSSSSGHKRHKKHKRNRSESSRSSRRHSSRASSNQIDQNRKDECYPVPANTSASFLNHKQEVEKLLGKQDRLQYEKTQIKEKDRCPLSSSSLEIPDDFGGRSEDPRDFYNSYKTQAGSSKTEKPYKSERHFSSRRNSSDSFCRNSEDKIYGYRRFEKDIEGRKEHYRRWEPGSVRHSTSPASSEYSWKSVEKYKKYAHSGSRDFSRHEQRYRLNTNQGEYEREDNYGEDIKTEVPEEDALSSKEHSESSVKKNLPQNLLNIFNQIAEFEKEKGNKSKN

SEQ ID NO: 8 - DNA, 2794 bp, Homo sapiens
  CDS (47)..(2356)
agggaactatcagcccgtcggcctccgggccctgcattctctagccatggaccgggaccttttgcggcagtcgctaaattgccacgggtcgtctttgctctctctacttcggagcgaacagcaggacaatccacacttccgtagcctcctggggtcggccgccgagccagcccggggcccgccgccccagcacccgttgcagggcagaaaagagaagagagttgacaacatcgagatacagaaattcatctccaaaaaagcggatctgctttttgcactttcctggaaatcagatgcacctgcaacttctgaaattaatgaagacagtgaagatcattatgcaatcatgccacctttagagcaattcatggagatacctagtatggatcggagagagctgtttttccgagatattgagcgtggtgatatagtgattggaagaattagttctattcgggaattcggttttttcatggtgttgatctgtttaggaagtggtatcatgagagatatagcccacttagaaatcacagctctttgtcccttaagagatgtgccttctcacagtaaccatggggatcctttatcatattaccaaactggtgacatcattcgagctggaatcaaggatattgacagataccatgaaaagctagcagtatctctgtatagctcttctcttccaccacacctatctggtattaaattaggtgtaattagctctgaagagcttcctttatactacaggagaagtgttgagctaaatagcaattctttggagtcctatgaaaatgtcatgcagagttccttgggatttgttaatccaggagtagttgaattccttctagaaaaactaggaatagatgaatctaatccaccatctttaatgagaggcctacaaagcaaaaatttctctgaagatgattttgcttctgcattgagaaaaaaacaatccgcatcttgggctttaaaatgtgtgaagatcggagttgactattttaaagttggacgccatgtggatgctatgaatgaatacaataaagctttggaaatagacaaacaaaacgtggaagctttggtagctcgtggagcattatatgcgacaaaaggaagttttgaacaaagcaatagaagatttgagcttgcattagaaaactgtccaactcacagaaatgcaagaaaatacctctgccagacacttgtagagagaggaggacagttagaagaagaagaaaagtttttaaatgctgaaagttactataagaaagctttggctttggatgagacttttaaagatgcagaggatgctttgcagaaacttcataaatatatgcagaaatctttggaattaagagaaaaacaagctgaaaaggaagaaaagcagaaaacaaagaaaatagaaacaagtgcagaaaagttgcgtaagctcttaaaagaagagaagaggctaaagaagaaaagaagaaaatcaacttcttcttcaagtgtttcttctgctgatgaatcagtgtcttcatcatcatcctcttcctcttctggtcacaaaaggcataagaaacataagaggaaccgttcagagtcttctcgcagttccagaaggcattcatctagggcatcctcaaatcagatagatcagaataggaaagatgagtgctacccagttccagctaatacttcagcatcttttcttaaccataaacaagaagtggagaaactactggggaagcaggataggttacagtatgaaaagacacagataaaagagaaagatagatgccctctctcttcatcttcacttgaaataccggatgattttggaggtaggtctgaagatccaagagatttttataacagctataaaacccaagcaggtagtagcaaaacagaaaagccatataaatcagaaagacatttttccagtagaagaaattcctcagattccttctgtaggaattcagaggacaagatttatggttataggagatttgaaaaggatatagagggaagaaaagagcactatagaaggtgggaaccaggttctgtgaggcattctacctcaccagcaagctcagaatactcttggaagtcagttgagaaatacaaaaaatacgctcactctggatcacgtgatttcagtagacatgagcaaagataccgtttaaatacaaatcaaggagaatatgaaagagaggacaattatggggaggatatcaaaacagaggttccagaagaagatgcactaagtagcaaagaacactcagaaagcagtgttaagaaaaatttacctcagaatttactgaatatatttaatcagatagctgaatttgaaaaagaaaaaggaaataagtcaaaaaattaatacaccaaggatatcggcaccattacacaaaatgccattaagtgaagtttttggttgtattagtcataacagttgagtgcagaaatctctgcttctaaaattatttgtagagattacaggaaacaaatgcttttaagtaagtttttctcaaattttgtttcagttctaggtcccttgtcacagcttggtttttagactttttatgtatatgtttatgtacagtatattactcttgacagtttgaatttcttcacctaaagataattctctgaaagtactgtttcttcattctattgcggtatatgagaattcctgggtgcatcttattctgctgtttgagagaaaaatttgtgcattgaacacttggatcatttttataaaaattaatttcattttcttttctgttaaattaaaaatcgtcagcttttgaaagat

SEQ ID NO: 9 - protein, 106 aa, Homo sapiens
MWNGVASPTAWCGRPSRCSRGFSPSSATWASAHPQESFGTSRAPTLSQRTTWPLESLPSTGSWTLLRSMLAGPTHGTRLCTTPLRSTSTACTISAVTTATRTWHWP

SEQ ID NO: 10 - DNA, 1513 bp, Homo sapiens
  CDS (90)..(407)
acccccgcccaggatggcggaagtggaggcgccgacggcggccgagacggacatgaagcaatatcaaggctccggcggcgtcgccatggatgtggaacggagtcgcttcccctactgcgtggtgtggacgcccatcccggtgctcacgtggtttttccccatcatcggccacatgggcatctgcacatccacaggagtcattcgggacttcgcgggcccctactttgtctcagaggacaacatggcctttggaaagcctgccaagtactggaagttggaccctgctcaggtctatgctagcgggcccaacgcatgggacacggctgtgcacgacgcctctgaggagtacaagcaccgcatgcacaatctctgctgtgacaactgccactcgcacgtggcattggccctgaatctgatgcgctacaacaacagcaccaactggaatatggtgacgctctgcttcttctgcctgctctacgggaagtacgtcagcgttggggccttcgtgaagacctggctgcccttcatccttctcctgggcatcatcctcaccgtcagcctggtctttaacctccggtgatggctgctcggtggccccacacccaccagggtcccgaggaaacagccgccatcccttttggttccagatttttttctcctcaccccaaaaggcagggttgggcctgctgttgtggaccgggggtcggggctggcaggatggaaggactgaggaccagcatgaagtgggggtttgttgtctccctgcctctcagaagcaccctgtcccctcctccccaggcctgtgactccggccctggaagcccctttgttcttctgttgaaaggctttggcttcccgctgtagagctgctcccgccaccacctgctggggtcctgcctcagcccagtgcccagtatggggagaggaggacatttgggctcacctgtcaaggtggccctgggaccagagctggtcccagcatggggtgcaccgggtacacttaacgtgtctctataagccaagttgcttcaggaccttcaccactggcctctagaatggtccagaggggctggctgggtccctttgtcagactcctgccggcagctgccctgggggacatgtgtgcccatctggcatcctccagcccgtgcagtccgctcttcactgttccacggcctcccagtgcctcccagtattggacccatctccccctgcagtttgaggccagagaggtgagtggacctgacaagtgccagagtaaccgtgtagacagagcagtgtagacagcactcagccccagccccaggtgtggacctcatgctggtgatggctcccctgggtggcctgccagcacagccagtgccatcagggagctgaaggggctgtcccccacctaactccagctcccccttcacgttgtcaccaaggccctgtgccgcccgcctcgcccccctgctctgtggattcctttgggaagggctccctgggcaggacaataaagagttttgactcc

SEQ ID NO: 11 - protein, 188 aa, Homo sapiens
MAEVEAPTAAETDMKQYQGSGGVAMDVERSRFPYCVVWTPIPVLTWFFPIIGHMGICTSTGVIRDFAGPYFVSEDNMAFGKPAKYWKLDPAQVYASGPNAWDTAVHDASEEYKHRMHNLCCDNCHSHVALALNLMRYNNSTNWNMVTLCFFCLLYGKYVSVGAFVKTWLPFILLLGIILTVSLVFNLR

SEQ ID NO: 12 - DNA, 1513 bp, Homo sapiens; identical to SEQ ID NO: 10
  CDS (14)..(577)

SEQ ID NO: 13 - protein, 283 aa, Homo sapiens
MVSAAAPSLLILLLLLLGSVPATDARSVPLKATFLEDVAGSGEAEGSSASSPSLPPPWTPALSPTSMGPQPTTLGGPSPPTNFLDGIVDFFRQYVMLIAVVGSLAFLLMFIVCAAVITRQKQKASAYYPSSFPKKKYVDQSDRAGGPRAFSEVPDRAPDSRPEEALDSSRQLQADILAATQNLKSPTRAALGGGDGARMVEGRGAEEEEKGSQEGDQEVQGHGVPVETPEAQEEPCSGVLEGAVVAGEGQGELEGSLLLAQEAQGPVGPPESPCACSSVHPSV

SEQ ID NO: 14 - DNA, 1866 bp, Homo sapiens
  CDS (116)..(964)
agcagccccgggcaccagcacggactctctcttccagcccaggtgccccccactctcgctccattcggcgggagcacccagtcctgtacgccaaggaactggtcctgggggcaccatggtttcggcggcagcccccagcctcctcatccttctgttgctgctcctggggtctgtgcctgctaccgacgcccgctctgtgcccctgaaggccacgttcctggaggatgtggcgggtagtggggaagccgagggctcgtcggcctcctccccgagcctcccgccaccctggaccccggccctcagccccacatcgatggggccccagcccacaaccctggggggcccatcaccccccaccaacttcctggatgggatagtggacttcttccgccagtacgtgatgctgattgctgtggtgggctccctggcctttctgctgatgttcatcgtctgtgccgcggtcatcacccggcagaagcagaaggcctcggcctattacccatcgtccttccccaagaagaagtacgtggaccagagtgaccgggccgggggcccccgggccttcagtgaggtccccgacagagcccccgacagcaggcccgaggaagccctggattcctcccggcagctccaggccgacatcttggccgccacccagaacctcaagtcccccaccagggctgcactgggcggtggggacggagccaggatggtggagggcaggggcgcagaggaagaggagaagggcagccaggagggggaccaggaagtccagggacatggggtcccagtggagacaccagaggcgcaggaggagccgtgctcaggggtccttgagggggctgtggtggccggtgagggccaaggggagctggaagggtctctcttgttagcccaggaagcccagggaccagtgggtccccccgaaagcccctgtgcttgcagcagtgtccaccccagtgtctaacagtcctcccgggctgccagccctgactgtcgggcccccaagtggtcacctccccgtgtatgaaaaggccttcagccctgactgcttcctgacactccctccttggcctccctgtggtgccaatcccagcatgtgctgattctacagcaggcagaaatgctggtccccggtgccccggaggaatcttaccaagtgccatcatccttcacctcagcagccccaaagggctacatcctacagcacagctcccctgacaaagtgagggagggcacgtgtccctgtgacagccaggataaaacatccctcaaggctaggcgtgagccaccgtgcccggcccaaactactttttaaaacagctacagggtaaaatcctgcagcacccactctggaaaatactgctcttaattttcctgaaggtggccccctgtttctagttggtccaggattagggatgtggggtatagggcatttaaatcctctcaagcgctctccaagcacccccggcctgggggtgagtttctcatcccgctactgctgctgggatcaggttgaatgaatggaactcttcctgtctggcctccaaagcagcctagaagctgaggggctgtgtttgaggggacctccaccctggggaagtccgaggggctggggaagggtttctgacgcccagcctggagcaggggggccctggccaccccctgttgctcacacattgtctggcagcctgtgtccacaatattcgtcagtcctcgacagggagcctgggctccgtcctgctttagggaggctctggcaggaggtcctctcccccatccctccatctggggctcccccaacctctgcacagctctccaggtgctgagatataatgcaccagcacaataaacctttattccggc

SEQ ID NO: 15 - protein, 110 aa, Homo sapiens [sequence omitted]

SEQ ID NO: 16 - DNA, 1832 bp, Homo sapiens
  CDS (508)..(837)
gtaacaagatgccaacttttttcctttggggtaaaaggtacaaaaacaaactaaccacagttgaagagaagggcttccggagctgtatttgcagttttgtgttgggttttctaaaataatattcttacaaagtatttttttacctgttatgccctgtttgcaaaaacaatttagaaaaaaacaacaaagcaaaacctatcttggcaaaaaaaggaagtgagtcagagcccattttcaggaggcattggtgatgttcggctcacatattgtttgcagacacacaagaaatctggcttggccaggattggcactagctatgaagggctgagcgagtcacattaaggaacttcacggaactttatagcactccgacattttctgagcaagaggaagtcaaaatttatttaacacctaagcctttttgtagactcttttctatatattgcttaggctcaccatagcgaattctccagtgttaaaacttttctgttttcacatttgaactttatgggttttggggattttcttgtagttcttatatatccctatatattatatctatattgcaaaattttgactgtcagctacatgttggtaagacacaggcaaagtattactgtaactaagttatttttaaagttaaaatatatttttacgtgcctttggctttttattgcagagtctacattttatagattctacatcagatgttgtcacttatttccattgggattccattgtaagctgtgtatgtgcgtgtttggaaaagtgtattcatacttagtttttttttcttcatctgttatcatacttttaacagcaaccaataacggattgtaaagtgtaaaggcacaggttactcatgatgcttctgcagagactgtgggctacaccacatatgttatttggaaatataggtattttagtacagtacatacttgcattacataggtacttcaagcaacacaataaaaagtaaatgataaagtgaacttgcttgtttatagtaataaacaagaccataagagaataagtatagctagagaaattgcttctctgaaatgtacatgagcccttaaggtaagagatgatttccatctactctcattttgattacttccttatggtttgagaggctagaaactgagcctctctacttttggaaaaatgaacatgtgaggtcagatttttttttttttttttaagtcagcactgatgccaccctctcagtggtcatttctgagcatcttcctgacttgaacaccttctacagcaaactcttgcaagtccagtttcatccctgtaaggcaaatgtcttttcacgcagaaagtgccatatagacgagataaaggcagctaaaacgagggcagtagagagcacttacccgaccccaaggtgccagagatgccctgaggatggtggttaaggaaacaggagcaggaaatgtacacacagattcctgtccctttgccaactactccttccccatcaaagaaaaacacttgcacacagtaactaccagctccttctctcaaacttgtatttctcctggaaatgtatctcagaaatgacctcctctcccaaccacttcaacgattctttctttgggtttggggttcttgcagttctatcatctaaaataacctttggactgcaggtaaaatgcaattaggacaactaaccaagtagacgaaacaagttcccctaggcaggggtgtccaatattttagcttccctggaccgcattggaagaattttcttgggccacatgtaaaacacactaacactaaccatagttgatgagcttaaaaaaataaaaatagaaaattgc

SEQ ID NO: 17 - protein, 186 aa, Homo sapiens
MYPVALVMLQEDELLSKMRFALVPKLVKEEVFWRNYSYRVSLIKQSAQLTALAAQQQAAGKEEKSNGREQDLPLAEAVRPKTPPVVIKSQLKTQEDEEEISTSPGVSEFVSDAFDACNLNQEDLRKEMEQLVLDKKQEETAVLEEDSADWEKELQQELQEYEVVTESEKRDENWDKEIEKMLQEEN

SEQ ID NO: 18 - DNA, 1520 bp, Homo sapiens
  CDS (109)..(666)
aacgatgaagaaacaattcaacaacaaattttggccttatcagctgacaagaggaatttccttcgtgaccctccggctggcgtgcaatttaatttcgactttgatcagatgtaccccgtggccctggtcatgctccaggaggatgagctgctaagcaagatgagatttgccctcgttcctaaacttgtgaaggaagaagtgttctggaggaactactcttaccgcgtctccctgattaagcagtcagcccagctcacggccctggctgcccaacagcaggccgcagggaaggaggagaagagcaatggcagagagcaagatttgccgctggcagaggcagtacggcccaagacgccacccgttgtaatcaaatctcagcttaaaactcaagaggatgaggaagaaatttctactagcccaggtgtttctgagtttgtcagtgatgccttcgatgcctgtaacctaaatcaggaagatctaaggaaagaaatggagcaactagtgcttgacaaaaagcaagaggagacagccgtactggaagaggattctgcagattgggaaaaagaactgcagcaggaacttcaagaatatgaagtggtgacagaatctgaaaaacgagatgaaaactgggataaggaaatagagaaaatgcttcaagaggaaaattagctgttcctgaaatagaagaataatccttaacagtctgcaaactgacattaaattctagatgttgacaattactgaatcagaaggcatgaaagagtataattttatgaaattcaaaattattcttttttcaagttgaaacttgcctcttctactttaaaaaagtatatagaacagttacttctaataatcagaaagagatgttttacagaacatttctttaatataaagttagagatgtcttcataggcagtatggctatctttgccacagaaacataagtaaaattttagagttctgttttccatgaggtcaaaaatataatttattcctcagtcatggttttctaaatatctgtactccacattccattttaattgatatgagggtgttaaagtacctacttaatgggttgattactatcaaaatgaccaaattataccaaagaacttaagaggaagcactttcagaactattcacttgccaggtattttctaaaattccacctgaaagccaaaagataaaataaataagttgattttaatgatataagcatcacacaattttacattaagaaatactgtgcaggccatgcgtggtggctcaggcctgtaatcccagcactttgggaggccgaggtgggcagatcaccggaggtcaggagttcgagaccagccttgccaacatagtgaaaccctgtctctactaaaaatacaaaaattagccgggcatggtggcaggcacctgtaatcccagctactagggaggcttttgaacccaggaggcagaggttgcagcgagctgagatcgcgccactgcactccagcctgggtgatagagtgagattcagtctc

SEQ ID NO: 19 - protein, 186 aa, Homo sapiens
MYPVALVMLQEDELLSKMRFALVPKLVKEEVFWRNYFYRVSLIKQSAQLTALAAQQQAAGKEEKSNGREQDLPLAEAVRPKTPPVVIKSQLKTQEDEEEISTSPGVSEFVSDAFDACNLNQEDLRKEMEQLVLDKKQEETAVLEEDSADWEKELQQELQEYEVVTESEKRDENWDKEIEKMLQEEN

SEQ ID NO: 20 - DNA, 1520 bp, Homo sapiens
  CDS (109)..(666)
aacgatgaagaaacaattcaacaacaaattttggccttatcagctgacaagaggaatttccttcgtgaccctccggctggcgtgcaatttaatttcgactttgatcagatgtaccccgtggccctggtcatgctccaggaggatgagctgctaagcaagatgagatttgccctcgttcctaaacttgtgaaggaagaagtgttctggaggaactacttttaccgcgtctccctgattaagcagtcagcccagctcacggccctggctgcccaacagcaggccgcagggaaggaggagaagagcaatggcagagagcaagatttgccgctggcagaggcagtacggcccaagacgccacccgttgtaatcaaatctcagcttaaaactcaagaggatgaggaagaaatttctactagcccaggtgtttctgagtttgtcagtgatgccttcgatgcctgtaacctaaatcaggaagatctaaggaaagaaatggagcaactagtgcttgacaaaaagcaagaggagacagccgtactggaagaggattctgcagattgggaaaaagaactgcagcaggaacttcaagaatatgaagtggtgacagaatctgaaaaacgagatgaaaactgggataaggaaatagagaaaatgcttcaagaggaaaattagctgttcctgaaatagaagaataatccttaacagtctgcaaactgacattaaattctagatgttgacaattactgaatcagaaggcatgaaagagtataattttatgaaattcaaaattattcttttttcaagttgaaacttgcctcttctactttaaaaaagtatatagaacagttacttctaataatcagaaagagatgttttacagaacatttctttaatataaagttagagatgtcttcataggcagtatggctatctttgccacagaaacataagtaaaattttagagttctgttttccatgaggtcaaaaatataatttattcctcagtcatggttttctaaatatctgtactccacattccattttaattgatatgagggtgttaaagtacctacttaatgggttgattactatcaaaatgaccaaattataccaaagaacttaagaggaagcactttcagaactattcacttgccaggtattttctaaaattccacctgaaagccaaaagataaaataaataagttgattttaatgatataagcatcacacaattttacattaagaaatactgtgcaggccatgcgtggtggctcaggcctgtaatcccagcactttgggaggccgaggtgggcagatcaccggaggtcaggagttcgagaccagccttgccaacatagtgaaaccctgtctctactaaaaatacaaaaattagccgggcatggtggcaggcacctgtaatcccagctactagggaggcttttgaacccaggaggcagaggttgcagcgagctgagatcgcgccactgcactccagcctgggtgatagagtgagattcagtctc

SEQ ID NO: 21 - protein, 352 aa, Homo sapiens
MFRGLSSWLGLQQPVAGGGQPNGDAPPEQPSETVAESAEEELQQAGDQELLHQAKDFGNYLFNFASAATKKITESVAETAQTIKKSVEEGKIDGIIDKTIIGDFQKEQKKFVEEQHTKKSEAAVPPWVDTNDEETIQQQILALSADKRNFLRDPPAGVQFNFDFDQMYPVALVMLQEDELLSKMRFALVPKLVKEEVFWRNYSYRVSLIKQSAQLTALAAQQQAAGKEEKSNGREQDLPLAEAVRPKTPPVVIKSQLKTQEDEEEISTSPGVSEFVSDAFDACNLNQEDLRKEMEQLVLDKKQEETAVLEEDSADWEKELQQELQEYEVVTESEKRDENWDKEIEKMLQEEN

SEQ ID NO: 22 - DNA, 1982 bp, Homo sapiens
  CDS (73)..(1128)
gtggagtcaaaggcaaccagtgctcgctgcggtctctggggatcgggaccgcggcggcggcccgcgagcgggatgttccggggcttgagcagttggttgggcttgcagcagccggtggcaggcggtgggcagcccaatggagatgctccacccgagcagccgtccgagacggtggctgagtctgcggaggaggagctgcagcaagcgggagaccaggagctcctccaccaggccaaagacttcggcaactatttatttaactttgcatctgctgccacaaaaaagataactgaatcagttgctgaaacagcacaaacaataaagaaatccgtagaagaaggaaaaatagatggcatcattgacaagacaattataggagattttcagaaggaacagaaaaaatttgttgaagagcaacatacaaagaagtcagaagcagctgtgcccccatgggttgacactaacgatgaagaaacaattcaacaacaaattttggccttatcagctgacaagaggaatttccttcgtgaccctccggctggcgtgcaatttaatttcgactttgatcagatgtaccccgtggccctggtcatgctccaggaggatgagctgctaagcaagatgagatttgccctcgttcctaaacttgtgaaggaagaagtgttctggaggaactactcttaccgcgtctccctgattaagcagtcagcccagctcacggccctggctgcccaacagcaggccgcagggaaggaggagaagagcaatggcagagagcaagatttgccgctggcagaggcagtacggcccaagacgccacccgttgtaatcaaatctcagcttaaaactcaagaggatgaggaagaaatttctactagcccaggtgtttctgagtttgtcagtgatgccttcgatgcctgtaacctaaatcaggaagatctaaggaaagaaatggagcaactagtgcttgacaaaaagcaagaggagacagccgtactggaagaggattctgcagattgggaaaaagaactgcagcaggaacttcaagaatatgaagtggtgacagaatctgaaaaacgagatgaaaactgggataaggaaatagagaaaatgcttcaagaggaaaattagctgttcctgaaatagaagaataatccttaacagtctgcaaactgacattaaattctagatgttgacaattactgaatcagaaggcatgaaagagtataattttatgaaattcaaaattattcttttttcaagttgaaacttgcctcttctactttaaaaaagtatatagaacagttacttctaataatcagaaagagatgttttacagaacatttctttaatataaagttagagatgtcttcataggcagtatggctatctttgccacagaaacataagtaaaattttagagttctgttttccatgaggtcaaaaatataatttattcctcagtcatggttttctaaatatctgtactccacattccattttaattgatatgagggtgttaaagtacctacttaatgggttgattactatcaaaatgaccaaattataccaaagaacttaagaggaagcactttcagaactattcacttgccaggtattttctaaaattccacctgaaagccaaaagataaaataaataagttgattttaatgatataagcatcacacaattttacattaagaaatactgtgcaggccatgcgtggtggctcaggcctgtaatcccagcactttgggaggccgaggtgggcagatcaccggaggtcaggagttcgagaccagccttgccaacatagtgaaaccctgtctctactaaaaatacaaaaattagccgggcatggtggcaggcacctgtaatcccagctactagggaggcttttgaacccaggaggcagaggttgcagcgagctgagatcgcgccactgcactccagcctgggtgatagagtgagattcagtctc

SEQ ID NO: 23 - protein, 352 aa, Homo sapiens
MFRGLSSWLGLQQPVAGGGQPNGDAPPEQPSETVAESAEEELQQAGDQELLHQAKDFGNYLFNFASAATKKITESVAETAQTIKKSVEEGKIDGIIDKTIIGDFQKEQKKFVEEQHTKKSEAAVPPWVDTNDEETIQQQILALSADKRNFLRDPPAGVQFNFDFDQMYPVALVMLQEDELLSKMRFALVPKLVKEEVFWRNYFYRVSLIKQSAQLTALAAQQQAAGKEEKSNGREQDLPLAEAVRPKTPPVVIKSQLKTQEDEEEISTSPGVSEFVSDAFDACNLNQEDLRKEMEQLVLDKKQEETAVLEEDSADWEKELQQELQEYEVVTESEKRDENWDKEIEKMLQEEN

SEQ ID NO: 24 - DNA, 1982 bp, Homo sapiens
  CDS (73)..(1128)
gtggagtcaaaggcaaccagtgctcgctgcggtctctggggatcgggaccgcggcggcggcccgcgagcgggatgttccggggcttgagcagttggttgggcttgcagcagccggtggcaggcggtgggcagcccaatggagatgctccacccgagcagccgtccgagacggtggctgagtctgcggaggaggagctgcagcaagcgggagaccaggagctcctccaccaggccaaagacttcggcaactatttatttaactttgcatctgctgccacaaaaaagataactgaatcagttgctgaaacagcacaaacaataaagaaatccgtagaagaaggaaaaatagatggcatcattgacaagacaattataggagattttcagaaggaacagaaaaaatttgttgaagagcaacatacaaagaagtcagaagcagctgtgcccccatgggttgacactaacgatgaagaaacaattcaacaacaaattttggccttatcagctgacaagaggaatttccttcgtgaccctccggctggcgtgcaatttaatttcgactttgatcagatgtaccccgtggccctggtcatgctccaggaggatgagctgctaagcaagatgagatttgccctcgttcctaaacttgtgaaggaagaagtgttctggaggaactacttttaccgcgtctccctgattaagcagtcagcccagctcacggccctggctgcccaacagcaggccgcagggaaggaggagaagagcaatggcagagagcaagatttgccgctggcagaggcagtacggcccaagacgccacccgttgtaatcaaatctcagcttaaaactcaagaggatgaggaagaaatttctactagcccaggtgtttctgagtttgtcagtgatgccttcgatgcctgtaacctaaatcaggaagatctaaggaaagaaatggagcaactagtgcttgacaaaaagcaagaggagacagccgtactggaagaggattctgcagattgggaaaaagaactgcagcaggaacttcaagaatatgaagtggtgacagaatctgaaaaacgagatgaaaactgggataaggaaatagagaaaatgcttcaagaggaaaattagctgttcctgaaatagaagaataatccttaacagtctgcaaactgacattaaattctagatgttgacaattactgaatcagaaggcatgaaagagtataattttatgaaattcaaaattattcttttttcaagttgaaacttgcctcttctactttaaaaaagtatatagaacagttacttctaataatcagaaagagatgttttacagaacatttctttaatataaagttagagatgtcttcataggcagtatggctatctttgccacagaaacataagtaaaattttagagttctgttttccatgaggtcaaaaatataatttattcctcagtcatggttttctaaatatctgtactccacattccattttaattgatatgagggtgttaaagtacctacttaatgggttgattactatcaaaatgaccaaattataccaaagaacttaagaggaagcactttcagaactattcacttgccaggtattttctaaaattccacctgaaagccaaaagataaaataaataagttgattttaatgatataagcatcacacaattttacattaagaaatactgtgcaggccatgcgtggtggctcaggcctgtaatcccagcactttgggaggccgaggtgggcagatcaccggaggtcaggagttcgagaccagccttgccaacatagtgaaaccctgtctctactaaaaatacaaaaattagccgggcatggtggcaggcacctgtaatcccagctactagggaggcttttgaacccaggaggcagaggttgcagcgagctgagatcgcgccactgcactccagcctgggtgatagagtgagattcagtctc

SEQ ID NO: 25 - protein, 103 aa, Homo sapiens [sequence omitted]

SEQ ID NO: 26 - DNA, 451 bp, Homo sapiens
  CDS (40)..(348)
agccaaggagcaataactgaacgtttaagaagcttcagtatgcatgatttaacaactatccaaggtgatgagcctgtgggacaaagaccataccaacctctaccagaagcaaaaaagaaaagtaaaccagcccccagtgaatcagcaggttatggaattccactgaaagacggagatgagaaaacagatgaagaagcagaggggccatattcagataatgagatgttaacacacaaagggcttcgaagatcgcaaagcatgaaatctgtgaaaaccaccaaaggccgcaaagaggtgcggtacgggtcactaaaatacaaagtgaagaaacgaccacaagtgtatttttagtcatctacacgtcaaatatcccaagacagattatgctaaatacatcgacttcatcttctaacatgatatattcaggatttacacattaaaatgattattt

SEQ ID NO: 27 - protein, 217 aa, Homo sapiens [sequence omitted]

SEQ ID NO: 28 - DNA, 763 bp, Homo sapiens
  CDS (10)..(660)
gttcgatggatgatgtactggattgtttttgctctctatactgtgattgaaacagtagccgatcaaacagttgcttggtttcccctgtactatgagctgaagattgcttttgtcatatggctgctttctccctataccaaaggagcaagtttaatatatagaaaattccttcatccacttctttcttcaaaggaaagggagattgatgattatattgtacaagcaaaggaacgaggctatgaaaccatggtaaactttggacggcaaggtttaaaccttgcagctactgctgctgttactgcagcagtaaagagccaaggagcaataactgaacgtttaagaagcttcagtatgcatgatttaacaactatccaaggtgatgagcctgtgggacaaagaccataccaacctctaccagaagcaaaaaagaaaagtaaaccagcccccagtgaatcagcaggttatggaattccactgaaagacggagatgagaaaacagatgaagaagcagaggggccatattcagataatgagatgttaacacacaaagggcttcgaagatcgcaaagcatgaaatctgtgaaaaccaccaaaggccgcaaagaggtgcggtacgggtcactaaaatacaaagtgaagaaacgaccacaagtgtatttttagtcatctacacgtcaaatatcccaagacagattatgctaaatacatcgacttcatcttctaacatgatatattcaggatttacacattaaaatgattattt

SEQ ID NO: 29 - protein, 266 aa, Homo sapiens
MGSKTLPAPVPIHPSLQLTNYSFLQAVNGLPTVPSDHLPNLYGFSALHAVHLHQWTLGYPAMHLPRSSFSKVPGTVSSLVDARFQLPAFPWFPHVIQPKPEITAGGSVPALKTKPRFDFANLALAATQEDPAKLGRGEGPGSPAGGLGALLDVTKLSPEKKPTRGRLPSKTKKEFVCKFCGRHFTKSYNLLIHERTHTDERPYTCDICHKAFRRQDHLRDHRYIHSKEKPFKCQECGKGFCQSRTLAVHKTLHSQVKELKTSKIKC

SEQ ID NO: 30 - DNA, 2105 bp, Homo sapiens
  CDS (517)..(1314)
actgcccctccctccctcctcccaaagagcacgggctgtgtcctaggagcccaagtataggacctcgaaacgtgcggtgccagcccgctctcatctgctagggaccgtttcctccagtgcgccaggcgtgccgctctggacctaaaaaggcagcaggggtcgcgcgggactgaagaggaggggacgcaggttgggagaggccgggtccaagcgagagcagctgccaaagtctgctgcccggctgctcctggttcagacccagcgagggagccgcgagcgaggctcaccgtccccggcgtgcaggatccggggctgctgagcgctcgctcccgcgtgtccggcgcttggagtccccgcggcaggagaggagtcgggacactagagctccaggggcgcctgtgggctccagggcctccggcttccccagtccccttcagctaaagccccagagacgtgctcagccccaggacctctgcggaacaagatccggattgagaagccactgcaactaccgaaatgggcagcaaaaccttgccggcgccggtgcctatccacccttccctgcagctcaccaactactccttccttcaggcagtgaacggcctgcccacagtgccttcggaccatctgcccaacctgtatggtttcagcgcgttgcacgctgtgcacctgcatcagtggacgctgggctacccggccatgcacttgccgcgctcttctttctccaaagtgccgggcacggtgtccagcttggtggatgcgcgcttccagctgcccgcctttccctggttccctcatgtcattcaacccaagcccgagatcaccgctggaggcagcgttccagcgctcaagaccaagccgcgctttgattttgccaacctggccttggcagcaacgcaagaagatccggccaagctcggtcgcggggagggcccaggctcccctgcaggtgggctgggtgccctcctcgacgtgaccaagctgtctccagaaaagaagcccacaaggggacgtctgccttccaagaccaagaaggaattcgtctgcaagttctgtggccgccacttcaccaagtcctacaacctacttatccatgagcggacgcacaccgacgagcggccctacacctgtgacatctgccacaaagccttccggaggcaagaccacctacgagaccacagatatattcactccaaagagaagcccttcaagtgtcaagagtgtgggaaaggattctgccagtccaggactctcgctgtccacaagacgctacactcacaggtgaaggagctcaaaacctccaagatcaaatgctaaatagaacctgtgggtcacaaggaccctaggcccagcggccctctcctccatagggaccagaagcctgactctggcgggcagcgggagaggcgctcgctcgggaccttccacctctccaacattgtcccctgggtccctggcgcacgcggcacttcagagccccgcccggggccgcgaccccgaccgtccctgctgctcccctaggacgcggctaaactcttggccaaaaggcggtactcacgtggcggaagggaaactgcattaaaaaaagaacgaaagctccgcggagccgcagcggcgcctctcccagaagtattactttttctattgttattttatacgttttcttttttatttttgtctttgaccatataagcttgtaactctgactgcggagagtgagtggagagaggagaggcaacgaagtccttagcactggcagctcccacctcctcctcccgcccctgcccccacccccggagcctgcaaaagtgtaatccctgtatctgcttcagcctcctgccctagggaccgcggggcagccccctcccagctcttgcagctcagctggcggccgtgggctccgggactaggagagcgggacggggacctcgggcctggggtctgcagggggcccggcctccgctgccgcgacactgcgagggagcagccagccaagagccgggcgttatattgcgattggcactttatgctgaccatcggtaacggacatttatcactggagtttttttttttttaactattaaataaacggttattttacaggc

SEQ ID NO: 31 - protein, 423 aa, Homo sapiens
MLPWKKHKFELLAEAPPRQASKPKGYAVSLHYSALSSLARACPEGALSRVGSMFRSKRKKLHITSEDPTYTVLYLGNATTIQARGDGCTDLAVGKIWSKSEAGRQGTKMKLTVSAQGIRMVHAEERALRRPGHLYLLHRVTYCVADARLPKVFAWVYRHELKHKAVMLRCHAVLVSKPEKAQAMALLLYQTSANALAEFKRLKRRDDARHQQQELVGAHTIPLVPLRKLLLHGPCCYKPPVERSRSAPKLGSITEDLLGEQLEQELQEEEEEEQPEGCPEEEENRAAEGDPAEEEAEAQRALVVAMHFECGDLLDTLENGRGEALGGGGGSLGPGAGPPPLLLGSASDMKAELSQLISDLGELSFGNDVRTLQADLRVTRLLSGDSTGSESSIEGGGPDATSATAGDSSRQADGASADEPHSG

SEQ ID NO: 32 - DNA, 2042 bp, Homo sapiens
  CDS (341)..(1609)
ttctcccttgcattttgttgcttgcctgagactctttgctctcgcccttgcccaggctggggtaattctgtgtgcgcgcgtgtctcccccgcaccaaccttttttgcacactcgaagctgaatattttcttttttagagaatttacccgcacctcctgcggggttcctaagcactctctctgctcccctccccccaactccctaccacagggccgctcccagtagttttattcttcgatcttgcccgggccgagcctggcaggggccggtggctcagcgggcctcgcacccggcgctccgccgccgccgccgcccagctgcgccggggcgccctccggagatgctgccgtggaagaagcacaagttcgagctgctggccgaggcgccgccgcggcaggcgtccaagcccaagggctacgctgtgagcctgcactactcggcgctcagctcgctggcgcgggcgtgccccgaaggcgcgcttagccgggtgggcagcatgttccgctccaagcgcaagaagctgcacatcactagcgaggacccaacttacaccgtgctctacctgggcaatgccaccaccatccaggcgcgcggcgacggctgcaccgaccttgctgtgggcaagatctggagcaagagcgaggcgggccgtcagggcaccaagatgaagctgacggtgagtgcgcagggtatccgcatggtgcacgccgaggagcgcgcgctgcgccgcccgggccacctctacctgctgcaccgcgtcacctactgcgtggccgacgcgcggctgcccaaggtcttcgcctgggtgtaccggcacgagctgaagcacaaggccgtgatgctgcgctgccacgccgtgctggtgtccaagcccgaaaaggcgcaggccatggccctgctgctctaccagacgtcggccaacgcgctggcggaatttaaacgcctcaagcggcgggacgacgcgcgtcaccagcagcaggagctggtgggcgcacacaccatcccgctagtgccgctgcgcaagctgctcctacacggaccctgctgctataaaccgccggtggagcgcagccgcagcgcgcccaagcttggctccatcaccgaggacctgctcggcgaacagctggagcaggagctgcaggaggaagaggaagaggagcaacccgagggctgcccggaggaggaggagaaccgtgcggcagagggagatccagcagaggaggaggccgaggcgcagcgtgcgctagtggtcgccatgcactttgagtgcggggacttgttggatactctggagaatggccgtggggaggcgctaggaggcggcgggggctccctgggcccgggggccgggccgccgcctctgctgctgggcagcgcctccgacatgaaggctgagctgtcgcaacttattagcgacctgggcgagctcagcttcggcaacgacgtgcgcaccctgcaggccgacttgcgggtgacgcgcctgctgtcgggcgacagcaccggcagcgagagctccatcgagggcgggggccctgacgccacctccgccaccgccggggactcgtcccgccaggccgacggcgccagtgcagacgagccccactcgggctgagctcctccgcgcgtcgccggcgctccaccgtggctacccatccgtggtcccgacaacctccctgtcccttgcccgcccccaggaagggggaaatggggcatttggggcccagacctacacttggagcccaggtccagcgttcccccgaccgctttcccctacctcccggcccccgctcccgccccagcacttttggctctgttgcgcgtggggatgcggggagatttgagaggggaaaaccccgccaggagggagagagaggcacccctctgggatgcgggtgagggaaggttggctgaagttcctagtctcaggccgtaggtgcctggccagtttcctgtttgtggggcagctggggcctgaggaggaggggttcacttcctcctcccaccccctgggagcggccctgcgctgtcactgacatctcatt

SEQ ID NO: 33 - protein, 523 aa, Homo sapiens
MNENHGLNYTPLLYSRGNPGIMSPLAKKKLLSQVSGASLSSSYPYGSPPPLISKKKLIARDDLCSSLSQTHHGQSTDHMAVSRPSVIQHVQSFRSKPSEERKTINDIFKHEKLSRSDPHRCSFSKHHLNPLADSYVLKQEIQEGKDKLLEKRALPHSHMPSFLADFYSSPHLHSLYRHTEHHLHNEQTSKYPSRDMYRESENSSFPSHRHQEKLHVNYLTSLHLQDKKSAAAEAPTDDQPTDLSLPKNPHKPTGKVLGLAHSTTGPQESKGISQFQVLGSQSRDCHPKACRVSPMTMSGPKKYPESLSRSGKPHHVRLENFRKMEGMVHPILHRKMSPQNIGAARPIKRSLEDLDLVIAGKKARAVSPLDPSKEVSGKEKASEQESEGSKAAHGGHSGGGSEGHKLPLSSPIFPGLYSGSLCNSGLNSRLPAGYSHSLQYLKNQTVLSPLMQPLAFHSLVMQRGIFTSPTNSQQLYRHLAAATPVGSSYGDLLHNSIYPLAAINPQAAFPSSQLSSVHPSTKL

SEQ ID NO: 34 - DNA, 2091 bp, Homo sapiens
  CDS (27)..(1595)
tcaaagacaaagacctgactgggcccatgaacgagaaccatggacttaattacacgcccctgctctactctaggggcaacccaggcatcatgtccccactggccaagaaaaagcttttgtcccaagtgagtggggccagcctctccagcagctacccttatggctccccaccccctttgatcagcaaaaagaaactgattgctagggatgacttgtgttccagtttgtcccagacccaccatggccaaagcactgaccatatggcggtcagccggccatcagtgattcagcacgtccagagtttcagaagcaagccctcggaagagagaaagaccatcaatgacatctttaagcatgagaaactgagtcgatcagatccccaccgctgcagcttctccaagcatcaccttaacccccttgctgactcctacgtcctgaagcaagaaattcaggagggcaaggataaactcttagagaaaagggccctcccccattcccacatgcctagcttcctggctgacttctactcgtcccctcatctccatagcctctacagacacaccgagcaccatcttcataatgaacagacatccaaatacccttccagggacatgtacagggaatcggaaaacagttcttttccttcccacagacaccaagaaaagctccatgtaaattatctcacgtccctgcacctgcaagacaaaaagtcggcggcagcagaagcccctacggatgatcagcctacagatctgagccttcccaagaacccgcacaaacctaccggcaaggtcctgggcctggctcattccaccacagggccccaggagagcaaaggcatctcccagttccaggtcttaggcagccagagtcgagactgtcaccccaaagcctgtcgggtatcacccatgaccatgtcaggccctaaaaaataccctgaatcgctttcaagatcaggaaaacctcaccatgtgagactggagaatttcaggaagatggaaggcatggtccacccaatcctgcaccggaaaatgagcccgcagaacattggggcggcgcggccgatcaagcgcagcctggaggatttggaccttgtgattgcagggaaaaaggcccgggcagtgtctcccttagacccatccaaggaggtctctgggaaggagaaggcctctgagcaggagagtgaaggcagcaaagcagcgcacggtgggcattccgggggcggatcagaaggccacaagcttcccctctcctcccctatcttcccaggtctgtattccgggagcctgtgtaactcgggcctcaactccaggctcccggctgggtattctcattctctgcagtacttgaaaaaccagactgtgctttctccactcatgcagcccctggctttccactcgcttgtgatgcaaagaggaatttttacatcaccgacaaattctcagcagctgtacagacacttggctgcggctacacctgtaggaagttcatatggggaccttttgcataacagcatttaccctttagctgctataaatcctcaagctgcctttccatcttcccagctgtcatccgtgcaccccagtacaaaactgtaggctcagctctgcccagcagtccaaagcggcatggccaacagagcttcactccttacccaggagtgctggcttatagagttagaagtcagtatttcttctaatctgaggctatgatcagtcccagctgtaggggcccagaggggaggtgaacatgcctgatttttgtgggacaactgtagcccacaaactgactggctggtgagtcttgactcccttccaacacagatgcccaggcacctccagatcattcacttcgcacgtgggccttgtgaagggatttgtgaatatccaggaagaacttagaggaccccatctgagttcggatggtcaggaaacaatctgggcaaaaaagaggcaggcatttcaaaggaaggggcaaggaagactggcaaacagatggcaagggatgcccctctttttcataaaactctccaaggttcaatcaatgcaatgtatagtgaaacttcaatagatctttcattttgacactatt

SEQ ID NO: 35 - protein, 570 aa, Homo sapiens [sequence omitted]

SEQ ID NO: 36 - DNA, 2366 bp, Homo sapiens
  CDS (161)..(1870)
ctctcttagtgccctggtggactcaaaacaagaatccaaactgtgctgttttacagagagccctgaaagtgaaccccaagaagcatccttccccagcttccccaccacacagccaccgctggcaaaccagaatgagacggaggatgacaaactgcccgccatggcagattacattgccaactgcaccgtgaaggtggaccagctgggcagtgacgacatccacaatgcgctcaagcagaccccaaaggtccttgtggtccagtcgtttgacatgttcaaagacaaagacctgactgggcccatgaacgagaaccatggacttaattacacgcccctgctctactctaggggcaacccaggcatcatgtccccactggccaagaaaaagcttttgtcccaagtgagtggggccagcctctccagcagctacccttatggctccccaccccctttgatcagcaaaaagaaactgattgctagggatgacttgtgttccagtttgtcccagacccaccatggccaaagcactgaccatatggcggtcagccggccatcagtgattcagcacgtccagagtttcagaagcaagccctcggaagagagaaagaccatcaatgacatctttaagcatgagaaactgagtcgatcagatccccaccgctgcagcttctccaagcatcaccttaacccccttgctgactcctacgtcctgaagcaagaaattcaggagggcaaggataaactcttagagaaaagggccctcccccattcccacatgcctagcttcctggctgacttctactcgtcccctcatctccatagcctctacagacacaccgagcaccatcttcataatgaacagacatccaaatacccttccagggacatgtacagggaatcggaaaacagttcttttccttcccacagacaccaagaaaagctccatgtaaattatctcacgtccctgcacctgcaagacaaaaagtcggcggcagcagaagcccctacggatgatcagcctacagatctgagccttcccaagaacccgcacaaacctaccggcaaggtcctgggcctggctcattccaccacagggccccaggagagcaaaggcatctcccagttccaggtcttaggcagccagagtcgagactgtcaccccaaagcctgtcgggtatcacccatgaccatgtcaggccctaaaaaataccctgaatcgctttcaagatcaggaaaacctcaccatgtgagactggagaatttcaggaagatggaaggcatggtccacccaatcctgcaccggaaaatgagcccgcagaacattggggcggcgcggccgatcaagcgcagcctggaggatttggaccttgtgattgcagggaaaaaggcccgggcagtgtctcccttagacccatccaaggaggtctctgggaaggagaaggcctctgagcaggagagtgaaggcagcaaagcagcgcacggtgggcattccgggggcggatcagaaggccacaagcttcccctctcctcccctatcttcccaggtctgtattccgggagcctgtgtaactcgggcctcaactccaggctcccggctgggtattctcattctctgcagtacttgaaaaaccagactgtgctttctccactcatgcagcccctggctttccactcgcttgtgatgcaaagaggaatttttacatcaccgacaaattctcagcagctgtacagacacttggctgcggctacacctgtaggaagttcatatggggaccttttgcataacagcatttaccctttagctgctataaatcctcaagctgcctttccatcttcccagctgtcatccgtgcaccccagtacaaaactgtaggctcagctctgcccagcagtccaaagcggcatggccaacagagcttcactccttacccaggagtgctggcttatagagttagaagtcagtatttcttctaatctgaggctatgatcagtcccagctgtaggggcccagaggggaggtgaacatgcctgatttttgtgggacaactgtagcccacaaactgactggctggtgagtcttgactcccttccaacacagatgcccaggcacctccagatcattcacttcgcacgtgggccttgtgaagggatttgtgaatatccaggaagaacttagaggaccccatctgagttcggatggtcaggaaacaatctgggcaaaaaagaggcaggcatttcaaaggaaggggcaaggaagactggcaaacagatggcaagggatgcccctctttttcataaaactctccaaggttcaatcaatgcaatgtatagtgaaacttcaatagatctttcattttgacactatt

SEQ ID NO: 37 - protein, 141 aa, Homo sapiens [sequence omitted]

SEQ ID NO: 38 - DNA, 2341 bp, Homo sapiens
  CDS (334)..(756)
ttgaagacagtatcatcccaaatttaaaaatcctattgtatatgttgtaaaattcctggcaaagaaatggaggatcctgtggcagctattcccacctaaagccaaccctataaggatgggtcattttttagccatgctaggatttactgcacacacaaaaaatgtcatttagcttgtcacattgctagcacagctgcacatatgagcaaagcactgttggtctgtgtttctcagtgggggtactcttggcatttggagctggataggtctttgctgtacagaatcatcccatgcattgccagatgtttaatatcccaggcccctgctgactaaatgtcagtagcattctcagtcattgtaaacaccaagaataaaaagcattcccccaggttcaaatgccctccctgggaggttggtatcacctcccctgaatgccactgtctactgcattttgaggacacagggagaaaaagtgcctatcctcaaacattgtctctgctgccttgcatttctttgggccctgaatggtttttctcccttcatttttcgagcctttctctcagtgcagctgttcttcagggaggaggttactgggcagccttggccattcagtgggcatggggacttggcctagtccctatatatatatacttaaagtccctatatatacttaaaggagagatcatacatgaagaaagcttttttttttttttttttttgccttacaacttttctttagaaccacattattggtcataatccttgttactgtcatgaggattgttgcatgggttaaacacaaacacagactagcaattcacttgaacaaacctggtggtctttggaaataaatcaccattagatttcacctggttatgctgcatcccataagttccaaatgaatcacctgcttatcctattaacgaagcatttaattcacacacaaatgcttgaatttcccctgtataaatgtagtcatgcgattcaacttttctaataagatttgtgaatgctgcatcatgatgaaaatgtggattaactgtgggttgcatgcctgttgttcatacttcagtgatggtcacacacaaaacaagatgagttttacttaggtgaaacattattaaactgtactaacaatacagaaacatattctctttgtcgctttttatcaccaaaactgaatggcaaatatgtcttgacattacttggatgaactgtggctagcaaaatggaattaacttagccactatagttttttaaaacattaaagtttctaaattgtttttggggccgagtaacgcagagtcgataaaggtggttatattgtaagcttttagatggtgcttaagaattcttatctttttaaatagcagtatttttttttaagaataaattgtaaggagcaaataaggcagaatgccactctaccctcaggtcaattttatggtatatgaaaatgccagtaatatttgtgccacttgccaactcgggggaggaggggcttttcccttactggatacttttgttatagtttgactatgtcattatgttgtttagagagcctccacaatgagaagttgccactgcagggctaactcgccttcagaaataatcagaatgattcaagggtcaaaccactttcatcccttaaaatatagggactaatatttctttttcttttttttaaaaaaaacatttcttctgtggcttagaaatgtgccagtgtgttcaaaacatttacaccaacttcaccagatttaggacctattaaaaattcaaacaagtttctttttttttttttttttctgtgtaacagggatttttaaataacggactatatgcattcttttgttatttcacacttcagttaaagtgataacaatggtaaactgtgatcattatcagactgactgaatgctttctgatttccagtgagtgatctagttctacgtattacacaggtgtaatatctgtgagtgtaaataactggaactgtacactgattaacatgacagtttctcttttgttgttcttatctgtgctgtattatagtatgtgggtataaatatctacaagtatacacacatatgtacttgtattccactattgtaacctgaaagaaagactatgtattcccttttttaattccgtactggtatttgtgttatttaaaaagcaaaattctgctctatttagttgtataatattagaggatactttgctgtgcacaattccaagtgccttagaacattgtttagctttcctaagtatatataaatgcatatatgtataaaattgggaaaagttacctcaataaaatcattgggaaatccccagtttt

SEQ ID NO: 39 - protein, 135 aa, Homo sapiens [sequence omitted]

SEQ ID NO: 40 - DNA, 2343 bp, Homo sapiens
  CDS (334)..(738)
ttgaagacagtatcatcccaaatttaaaaatcctattgtatatgttgtaaaattcctggcaaagaaatggaggatcctgtggcagctattcccacctaaagccaaccctataaggatgggtcattttttagccatgctaggatttactgcacacacaaaaaatgtcatttagcttgtcacattgctagcacagctgcacatatgagcaaagcactgttggtctgtgtttctcagtgggggtactcttggcatttggagctggataggtctttgctgtacagaatcatcccatgcattgccagatgtttaatatcccaggcccctgctgactaaatgtcagtagcattctcagtcattgtaaacaccaagaataaaaagcattcccccaggttcaaatgccctccctgggaggttggtatcacctcccctgaatgccactgtctactgcattttgaggacacagggagaaaaagtgcctatcctcaaacattgtctctgctgccttgcatttctttgggccctgaatggtttttctcccttcatttttcgagcctttctctcagtgcagctgttcttcagggaggaggttactgggcagccttggccattcagtgggcatggggacttggcctagtccctatatatatatacttaaagtccctatatatacttaaaggagagatcatacatgaagaaagcttttttttttttttttttttttgccttacaacttttctttagaaccacattattggtcataatccttgttactgtcatgaggattgttgcatgggttaaacacaaacacagactagcaattcacttgaacaaacctggtggtctttggaaataaatcaccattagatttcacctggttatgctgcatcccataagttccaaatgaatcacctgcttatcctattaacgaagcatttaattcacacacaaatgcttgaatttcccctgtataaatgtagtcatgcgattcaacttttctaataagatttgtgaatgctgcatcatgatgaaaatgtggattaactgtgggttgcatgcctgttgttcatacttcagtgatggtcacacacaaaacaagatgagttttacttaggtgaaacattattaaactgtactaacaatacagaaacatattctctttgtcgctttttatcaccaaaactgaatggcaaatatgtcttgacattacttggatgaactgtggctagcaaaatggaattaacttagccactatagttttttaaaacattaaagtttctaaattgtttttggggccgagtaacgcagagtcgataaaggtggttatattgtaagcttttagatggtgcttaagaattcttatctttttaaatagcagtatttttttttaagaataaattgtaaggagcaaataaggcagaatgccactctaccctcaggtcaattttatggtatatgaaaatgccagtaatatttgtgccacttgccaactcgggggaggaggggcttttcccttactggatacttttgttatagtttgactatgtcattatgttgtttagagagcctccacaatgagaagttgccactgcagggctaactcgccttcagaaataatcagaatgattcaagggtcaaaccactttcatcccttaaaatatagggactaatatttctttttcttttttttaaaaaaaacatttcttctgtggcttagaaatgtgccagtgtgttcaaaacatttacaccaacttcaccagatttaggacctattaaaaattcaaacaagtttctttttttttttttttttctgtgtaacagggatttttaaataacggactatatgcattcttttgttatttcacacttcagttaaagtgataacaatggtaaactgtgatcattatcagactgactgaatgctttctgatttccagtgagtgatctagttctacgtattacacaggtgtaatatctgtgagtgtaaataactggaactgtacactgattaacatgacagtttctcttttgttgttcttatctgtgctgtattatagtatgtgggtataaatatctacaagtatacacacatatgtacttgtattccactattgtaacctgaaagaaagactatgtattcccttttttaattccgtactggtatttgtgttatttaaaaagcaaaattctgctctatttagttgtataatattagaggatactttgctgtgcacaattccaagtgccttagaacattgtttagctttcctaagtatatataaatgcatatatgtataaaattgggaaaagttacctcaataaaatcattgggaaatccccagtttt

SEQ ID NO: 41 - protein, 96 aa, Homo sapiens
MPKHPILGYLFLSPKHCVGDVNCDRKISWGPRITKENSSLGKLLRANPPPTLFKVISLLTEIDTYLIASFGKANQKLKRMQLFVSHLSVTWKLPPH

SEQ ID NO: 42 - DNA, 2952 bp, Homo sapiens
  CDS (328)..(615)
accgaaacattgttattggacacataactatagttgaaagaataagcaaaaagtctatctaggtgtgctgtcttgagcaacttttaattattctcccgtcctgcaatatgagttaatcttctctgatcgatgtagattccaggaaggggtgtccaggacaattaccttccttctggagaaacttcccttaatcaaataagagaacttcaaagaaaatccctccctgtgctttggaagggaagggaggtgggcagcagtgggtcagagatagacctttgttctcttatttctgaggcccttcagtctcctttattcaaagcactcagcatgccaaagcaccctattttagggtatctttttctgagccctaaacactgtgttggggatgtcaactgtgacaggaaaatatcttggggccccagaatcactaaggaaaactcaagcttagggaaacttcttagggcaaacccacctcccactctattcaaagttatctctctgctcactgagatagatacatatctgattgcctcctttggaaaggctaatcagaaactcaaaagaatgcaactgtttgtgtctcacctatctgtgacctggaagctccctccccactgaaccaatgttcttcttacatatattgattaatgtcttatgtctccctaaaatgtataaaaccaaggtatgccccaaccatcttggccacatgtcatcaggacttcctgagtctgtgtcacagtgtgtcctcaaccttggcaaaataaactttctaaattaactgagacctgtctcggattttctgggttcacattttggaaaccatgaatggattctgggtggagatgcccctgacccttgacaaatctatcggtgcttggtaccagcatgagctaactttatggctcaaaccaataggacaatttgctgaggtctgagaggactccctccagaaaatccctgatctcttaaaatttggtagagatcggaagtttattttgctgtacaacacctctttttttggagttttacttgctcccaacaaggaaggcaagttttcctgctttcatgatgatggaaggcaggtgatgtttttatggagtttcagctttcttccaatgcacttagagcactcagaaattgtataatttgtgtgaccattgttagttttgcttaactgttttgttgtttgtttctgtcttagtcaaatctgaaggggaaccctaaattacggggtcaaggactctgaagtggtaggaaaacagccagcttaaaaaactttttttaaattttaattactataggggctttatttacataacacagccagctttttgctagccagaccaaactcaaagagcaatggctgtacttctgaaatagcaacactttgtcctagctgagatttggtaataagattttttttttaagtttttaaagaagctcagtggttgaaagtctgcttaactgaaacagtaacatccatgatgtgtgttttgtgcatgtttgtatttgaaaggccttcatgtttttgtttcttgtttgtttttctctcctaagaccttgtcttttttttgtagcaaaagttttttttttttttttccttttacttctcagttgactgaattctgttttcaccggattttttgactaaaatagctattgcaacagaggctactcttgggttaaggaagaatgtagtttcgttttatgtttaatatcgctcaaagaaaaataaaagcatctccctctaacaccaccagacttttcctctctgtaccttatcatgtaaattttgctatttgattttcacctgggttgtttcctttaatgtgcaaaaatttaaggctatttagctgacaactgcctagggttgtaaaacaggttatcaagaatctgaaagtctaagataggaaaaaaaagtgggggggcattataaatctataaaatgtacttctattggcatgcctaatacgtctttatatgtatgtatgtgttgtgtacacgatgttttagtgctaaaaatatgtaaaagagctctacttggcttaaagaaaaataaaagtgcttaaatcagatactaaaaaagaaaaggctagtcaaatgctttttcaaatttatgtaacttaagtaaaatctttaataaataaagtagctttaaaattattggtaaagtagtattagaaatgtcttaagaattgccagcatacatttttgtttgcattatattaatcaaacagttttatacttatccctgccaaataccagaaggtgtcaaaatttggcataggggttataaaactataaacccagcccaaaacagaatgatctttgcttgtgtaatttttaataaataagacattgatatgggtttaatgaaaacagctgcatcttgaatttagtaagattaccataacttctaatcctgtggctttaggcagtttagtccacagacaataaggaggtttgttttgggaaaggactgttattgtcattgtttcgaagctgaacttaaactaggttcctcccaaagttcattcggcctatgcccaggaatgaacaaggacagcttggaagttaagagcaaggtggagtcagttaggtcaaatcgtttttcactgtctcagttgtaattttgcaatggaagtttcataactttaaatcatgactatcacagtttttataaataatctaggtaaacaattaataaaataactaggtaaatgtaatgggataaatacttatagaccaactggacataatttagaatataaagtcatattaaattaaataatagataatttattatttgggtattttccaataaatatatcttgtaggaaaacattgttgcttaaaaaaaagtgtgtccttttttaaaaaaatggtgaacaagttttgtctaattcaaagcttattaaaaggttatatataaaacaaggtaaaaggaaccag

SEQ ID NO: 43 - protein, 57 aa, Homo sapiens [sequence omitted]

SEQ ID NO: 44 - DNA, 2267 bp, Homo sapiens
  CDS (314)..(484)
gaaagatactcatgaaaaaagcagttttattttcctaacaaaaaagaaagagctcattatgtcagtgtctatgaactgtacccatcccaactctcaaatcgtttggttttttttatcttgattgagatcctcttctcactatgctagtggtggagatattgacaaaatcctatttctttcaaagaggaacttttcacaccgaaaaaagagcatggaattattttatattgttataaaaatcccagatgcaaatttttttaatgccaattattagagcttctggggaaaaagtatagttcacggaaataaaactatgttctttcagggttgggtggataggtggctgctagggtgtctggctcctggcggctttgccatccatgaggcaagggctgggaacacagtgtctttgcctatggtagatccatgtgaatgtcaggaagccagctcttcagtcttggagatgatttctgctacaattctgtagaaagattaaggatggcagagtaaaaggttaccaagaatgccaggatgtttttcttgggcgtaggaggtccagattactttcctttttgatgaaagagtttggaagactgtcccatctctctggcttgagaaatctctgccattttaaacatcactgtgaaatagcaattattatcatctgtatttagttttaacattacccacaacatagaaataataggtaaaaatcgtcttgcctactcattccaaagatgatcaagtcattaatctagcaaagtattcatgtatcagattttgtatattttgaatcaaagctaactaggaatgttagatataagaatgtaatgatattcatgcactgaattctaagccaatatgaacaaaaatgctgcatgaatggcacatataggtcaccaaagttcattcacaggtagaaaaaacttgtgctttcttttccatctaaaaacaaaaggagactttctttatctcatttaaagaacagctctttgaaattgaaattgaccctttttgcttgaccttaaggagattagcttccagtagatgagtttgcaaaatacttttcctgttcttttgttttgctggtattgaaaacatcccactaaatcagatgaagaggcatgggaggaaaaatatccaaattaattactaaaatcgagaagagaaggcaaactcttgaaaagtaaaaaggtgtttgtgaccttcagtatttattgaacagaggaaataactgacaagggcaatacaattcaatgttcatgtagtaacattcatgtcacttgttgaatttggttctcatatgtatattgcatacacataaattcaaactataagtcgtcatttttgagccatcatcttacattcatgtaatgaaattatggaagagagtaaaaactagctcttaacttagtaaatataatatggtatttaaaatcaggtcactacagtaaggttctaagtattgccaattgaaaagctagaaatggtattactgttgcaaagtgttgtcaataattgactccaatagcattgtaaatacttgtatcccacaactattttaaacccaagcaataaaatggattttctaattcacttcaattctttatttctcttacctatctatgtcttggtacataagaaaagtgtttccatcactgcattggtagaattatttcagtgttattatttttgtgatttcgtatgtctacacaaaaatgaattagtttaatttatattgtgatacagttgtttgagaaatatttttaattctgtttcaactttatttctccaagtgtataatataaaaattacttctgttattgttctctaccaataggggaaaaaattaaaacattagatccattgagaaagagatgatgtaataaataattaagattagtaataatattatcaggggtgattatgaccagttgaataatctctttcccttgaattatttagctaacaaattaactctcccaaatatttaaaataatgtaaaatcatattttactgcccattattaactaaaatatttttgtttgactttgagcaccaactggtaatactaataaatacccatgtcatgcagatggctgggcgaataagagatgtctaaaaatatgcactggtcttggaaaacatggcacaagtaaggatatcatatatgatgtctgtttattttatgtctgatttcttttgaatgagtagttggggactccatttctaaggagactaggtaaataaaatgacctttgacattt

SEQ ID NO: 45 - protein, 55 aa, Homo sapiens
MPAVVNVSAPRSWSCPLEPLYALLKKKTKKKNKKKKTTVEPSHSMPTFCYRLIFP

SEQ ID NO: 46 - DNA, 1646 bp, Homo sapiens
  CDS (109)..(273)
aaaatacctggagtgctcggcgctcacacagcgaggcctcaagacagtgtttgacgaagcgatccgagcagtcctctgcccgcctcccgtgaagaagaggaagagaaaatgcctgctgttgtaaatgtctcagcccctcgttcttggtcctgtcccttggaacctttgtacgctttgctcaaaaaaaaaacaaaaaaaaaaaacaaaaaaaaaaaaacaacggtggagccttcgcactcaatgccaactttttgttacagattaatttttccataaaaccattttttgaaccaatcagtaattttaaggttttgtttgttctaaatgtaagagttcagactcacattctattaaaatttagccctaaaatgacaagccttcttaaagccttatttttcaaaagcgccccccccattcttgttcagattaagagttgccaaaataccttctgaactacactgcattgttgtgccgagaacaccgagcactgaactttgcaaagaccttcgtctttgagaagacggtagcttctgcagttaggaggtgcagacacttgctctcctatgtagttctcagatgcgtaaagcagaacagcctcccgaatgaagcgttgccattgaactcaccagtgagttagcagcacgtgttcccgacataacattgtactgtaatggagtgagcgtagcagctcagctctttggatcagtctttgtgatttcatagcgagttttctgaccagcttttgcggagattttgaacagaactgctatttcctctaatgaagaattctgtttagctgtgggtgtgccgggtggggtgtgtgtgatcaaaggacaaagacagtattttgacaaaatacgaagtggagatttacactacattgtacaaggaatgaaagtgtcacgggtaaaaactctaaaaggttaatttctgtcaaatgcagtagatgatgaaagaaaggttggtattatcaggaaatgttttcttaagcttttcctttctcttacacctgccatgcctccccaaattgggcatttaattcatctttaaactggttgttctgttagtcgctaacttagtaagtgcttttcttatagaaccccttctgactgagcaatatgcctccttgtattataaaatctttctgataatgcattagaaggtttttttgtcgattagtaaaagtgctttccatgttactttattcagagctaataagtgctttccttagttttctagtaactaggtgtaaaaatcatgtgttgcagctttatagtttttaaaatattttagataattcttaaactatgaaccttcttaacatcactgtcttgccagattaccgacactgtcacttgaccaatactgaccctctttacctcgcccacgcggacacacgcctcctgtagtcgctttgcctattgatgttcctttgggtctgtgaggttctgtaaactgtgctagtgctgacgatgttctgtacaacttaactcactggcgagaatacagcgtgggacccttcagccactacaacagaattttttaaattgacagttgcagaattgtggagtgtttttacattgatcttttgctaatgcaattagcattatgttttgcatgtatgacttaataaatccttgaatcat

SEQ ID NO: 47 - protein, 113 aa, Homo sapiens
MPAVVNVSAPRSWSCPLEPLYALLKKKQKKKTKKKNNGGAFALNANFLLQINFSIKPFFEPISNFKVLFVLNVRVQTHILLKFSPKMTSLLKALFFKSAPPILVQIKSCQNTF

SEQ ID NO: 48 - DNA, 1644 bp, Homo sapiens
  CDS (109)..(447)
aaaatacctggagtgctcggcgctcacacagcgaggcctcaagacagtgtttgacgaagcgatccgagcagtcctctgcccgcctcccgtgaagaagaggaagagaaaatgcctgctgttgtaaatgtctcagcccctcgttcttggtcctgtcccttggaacctttgtacgctttgctcaaaaaaaaacaaaaaaaaaaaacaaaaaaaaaaaacaacggtggagccttcgcactcaatgccaactttttgttacagattaatttttccataaaaccattttttgaaccaatcagtaattttaaggttttgtttgttctaaatgtaagagttcagactcacattctattaaaatttagccctaaaatgacaagccttcttaaagccttatttttcaaaagcgccccccccattcttgttcagattaagagttgccaaaataccttctgaactacactgcattgttgtgccgagaacaccgagcactgaactttgcaaagaccttcgtctttgagaagacggtagcttctgcagttaggaggtgcagacacttgctctcctatgtagttctcagatgcgtaaagcagaacagcctcccgaatgaagcgttgccattgaactcaccagtgagttagcagcacgtgttcccgacataacattgtactgtaatggagtgagcgtagcagctcagctctttggatcagtctttgtgatttcatagcgagttttctgaccagcttttgcggagattttgaacagaactgctatttcctctaatgaagaattctgtttagctgtgggtgtgccgggtggggtgtgtgtgatcaaaggacaaagacagtattttgacaaaatacgaagtggagatttacactacattgtacaaggaatgaaagtgtcacgggtaaaaactctaaaaggttaatttctgtcaaatgcagtagatgatgaaagaaaggttggtattatcaggaaatgttttcttaagcttttcctttctcttacacctgccatgcctccccaaattgggcatttaattcatctttaaactggttgttctgttagtcgctaacttagtaagtgcttttcttatagaaccccttctgactgagcaatatgcctccttgtattataaaatctttctgataatgcattagaaggtttttttgtcgattagtaaaagtgctttccatgttactttattcagagctaataagtgctttccttagttttctagtaactaggtgtaaaaatcatgtgttgcagctttatagtttttaaaatattttagataattcttaaactatgaaccttcttaacatcactgtcttgccagattaccgacactgtcacttgaccaatactgaccctctttacctcgcccacgcggacacacgcctcctgtagtcgctttgcctattgatgttcctttgggtctgtgaggttctgtaaactgtgctagtgctgacgatgttctgtacaacttaactcactggcgagaatacagcgtgggacccttcagccactacaacagaattttttaaattgacagttgcagaattgtggagtgtttttacattgatcttttgctaatgcaattagcattatgttttgcatgtatgacttaataaatccttgaatcat

SEQ ID NO: 49 - protein, 226 aa, Homo sapiens
MAAMRWRWWQRLLPWRLLQARGFPQNSAPSLGLRARTYSQGDCSYSRTALYDLLGVPSTATQAQIKAAYYRQCFLYHPDRNSGSAEAAERFTRISQAYVVLGSATLRRKYDRGLLSDEDLRGPGVRPSRTPAPDPGSPRTPPPTSRTHDGSRASPGANRTMFNFDAFYQAHYGEQLERERRLRARREALRKRQEYRSMKGLRWEDTRDTAAIFLIFSIFIIIGFYI

SEQ ID NO: 50 - DNA, 1155 bp, Homo sapiens
  CDS (9)..(686)
aattcaacatggcagccatgcgctggcgatggtggcagcggctgttaccttggaggttgctgcaggcccgtggctttccacaaaattctgcacccagcctgggcctaagagcgaggacttattcccagggcgactgctcgtattcgcgcacggcgctgtatgatctgctcggcgtcccctccacagccacgcaggcccaaatcaaggcggcttactaccgtcagtgctttctctaccacccggaccgcaactccgggagcgcggaggccgccgagcgcttcacgcgcatctcccaggcctacgtggtgctgggcagtgccaccctccgtcgcaagtatgatcgcggcctactcagcgacgaggacctgcgcggacctggcgtccggccctccaggacgcccgcacccgaccccggctcgccgcgtaccccgccgcccacctctcggacccacgacggttctcgggcctcccccggcgccaaccgcacgatgttcaactttgacgccttctaccaggcccactacggggaacaactggagcgggaacggcgcctgagggcccggcgggaggcccttcgcaaacggcaggagtatcggtccatgaaaggcctccgctgggaggatacccgagacacggctgccattttcctcatcttttcaatcttcatcatcatcggcttttatatttaatcggagagagaagggaaggggagtgtccccagccaaccccccagaaacggccttttttcctgcctctgaacccttggccgttgatagtctacctttgctgggatccgaaggaactgtactccccctgccctccccgacccgcccagcttagccgatgacctgcacatcgctccactgtggtccagaaaaggaggcctttcgatgtctgagaaagaggccccacgctgtagagtcccgaaagcccaggagtgaagggggttcctggagtctctagggtgcttcttccagagtctgtcttcttgcttccagatgtggtcaacttctggaacactcgctgtagctttattgtttagccccaagcaagatttatctcctcctgccccgcatgtgtatggtgggcctctgtaaccttgaaatgtgcaatgtgaccaattgttgactaccaaaagaaaaggtctggggttgt

SEQ ID NO: 51 - protein, 131 aa, Homo sapiens
MICSASPPQPRRPKSRRLTTVSAFSTTRTATPGARRPPSASRASPRPTWCWAVPPSVASMIAAYSATRTCADLASGPPGRPHPTPARRVPRRPPLGPTTVLGPPPAPTARCSTLTPSTRPTTGNNWSGNGA

SEQ ID NO: 52 - DNA, 1155 bp, Homo sapiens; identical to SEQ ID NO: 50
  CDS (160)..(552)

SEQ ID NO: 53 - protein, 75 aa, Homo sapiens
MRKPLARWSGEAGGQEPRTACPRPREHSRAHPPCTTNGSAWSCVLSTPSTTFCSSSSLARRLPMRSARGWPQTPG

SEQ ID NO: 54 - DNA, 823 bp, Homo sapiens
  CDS (23)..(247)
agagccgccgcccaggaaggggatgcggaaacccctggctcggtggagcggagaggcaggcgggcaggagccgaggacggcatgtcccaggccccgggagcacagccgagcccacccaccgtgtaccacgaacggcagcgcctggagctgtgtgctgtccacgccctcaacaacgttctgcagcagcagctctttagccaggaggctgccgatgagatctgcaagaggttggccccagactcccggctgaaccctcatcgcagcctcctgggcaccggcaactatgatgtcaatgtgatcatggccgctctgcaggggctgggcctggccgccgtgtggtgggacaggaggaggcccctgtcccagctggccctgccccaggtactggggctgatcctgaacctgccctcgcccgtgtcgctggggctgctgtcactgccgctgcgccggcggcactgggtggccctgcgccaggtggacggtgtctactacaacctggactccaagctgcgggcgcccgaggccctgggggatgaggacggagtcagggccttcctggcggctgcgctggcccagggcctgtgcgaggtgctgctggtagtgaccaaggaggtggaggagaagggcagctggctgcggacagactgaccatggctgaccatcggcgcccacagcgcagtccctgcgcatccccctccggctgcgcacactgcatgcctgggaaaggccagcacttcatggaccctggggaggccccgccccctccccacacccctgctccccactgccgctgctgcctcaataaatctgctgatttgctgcc

SEQ ID NO: 55 - protein, 188 aa, Homo sapiens
MSQAPGAQPSPPTVYHERQRLELCAVHALNNVLQQQLFSQEAADEICKRLAPDSRLNPHRSLLGTGNYDVNVIMAALQGLGLAAVWWDRRRPLSQLALPQVLGLILNLPSPVSLGLLSLPLRRRHWVALRQVDGVYYNLDSKLRAPEALGDEDGVRAFLAAALAQGLCEVLLVVTKEVEEKGSWLRTD

SEQ ID NO: 56 - DNA, 823 bp, Homo sapiens; identical to SEQ ID NO: 54
  CDS (82)..(645)

SEQ ID NO: 57 - protein, 296 aa, Homo sapiens
MRRSMKRRRRRRPVAPATAARGGDFRAEDGAGLEAREEKVVYSRSQLSLADSTKALGDAFKLFMPRSTEFMSSDAELWSFLCSLKHQFSPHILRSKDVYGYSSCRALVPDPPAATPTAAAPRGELPGQARGPRALLRGPHLGGDLEGGHPDADHLPHHPRRQRRVGRAQPGGSAAQGAPGPASEPGTHGEAPPLPGAPGMRCGLQGASCRPRPWDRPSARRNEQVSVECLQIRPGPRPPMHFTREEVAGWLSLSRAAARSSWTLGQVCPLLPPVPGLRREGTAGPAGEVPFFLTTD

SEQ ID NO: 58 - DNA, 1582 bp, Homo sapiens
  CDS (110)..(997)
aagtagcgagagacgccagcagcagccgccgccgcggagccaacgcggactgggacggcggcggcagtagtgggacccggcgagcgtgagtggcccggagcggccttcgatgcggcgcagtatgaagaggcggcggcgccggcgcccggtcgccccggccacggccgcccggggcggcgactttagggcagaagacggggctgggttggaggcgcgggaggagaaggtggtgtactcgcggtcgcaactgtcgctggctgacagcaccaaggcgctgggcgacgccttcaagctcttcatgccccgcagcacggagttcatgagctcggacgcggagctctggagcttcctctgcagcctcaagcaccagttctccccgcacatcctgcgcagcaaggacgtctacggctactcctcctgccgggccctggtacccgaccccccggccgccacccccaccgccgccgccccccgaggagagctgcccggccaagcccgtggcccccgggccctgcttcgggggccgcaccttggaggagatctggagggcggccaccccgacgctgaccaccttccccaccatccgcgtcggcagcgacgtgtggggcgagcgcagcctggcggcagcgcggcgcagggcgcgccaggtcctgcgagtgaacctggaacccatggtgaggctccgccgcttcccggtgccccgggcatgaggtgcggcctccagggcgcctcctgccggccccgaccttgggacaggccttccgcccggaggaatgaacaagtgtcagtcgagtgtttacagatccggccaggaccccggcccccaatgcactttacgcgcgaagaagttgccggatggttgtccctgtcccgggccgcggcgcggtcgtcttggacgctggggcaggtgtgccctctgctgcctcccgtacccggcctgcggagggaggggacagctggacccgcaggggaggtccctttcttcctgaccaccgattgagacgtctccaggaccttaggggcagatccgttttctcactgttggactctacctcactggtctggaagtcctccgaagacattatttttccaaaggaatttggtttcgtgcttgtgtaataaagccagaatttacttgttctttatctccccctttttctatttcactgtcacccctctttgtggacagaagttcgaacatgtggtgttgcactagtttgtgctcagggtattctgaagcccactcgtttcctaatttttactggattccaaagctttgatcgaggatattttttaagaggttcaagcttgtgactgttagtagtgcaaggatttgtatgggctcagtgattacaaacaaagacatgcaaaatacaactgtttaaacattttcaaggtatttttaaaggttttgtattgaaacaatgtttatatttactgagctcctaaaaatggtagaatacacatgaaaacttttgtttaggaaaagttaacttgttaaattcttttgaattgaataaaaaaatgcattgaaaccatatggtgtgtgattaaaaaaaatgaataaattgtgaagaactgg

SEQ ID NO: 59 - protein, 235 aa, Homo sapiens
MRRSMKRRRRRRPVAPATAARGGDFRAEDGAGLEAREEKVVYSRSQLSLADSTKALGDAFKLFMPRSTEFMSSDAELWSFLCSLKHQFSPHILRSKDVYGYSSCRALVPDPPGPPTARGQARRPVPRAAARRRRRGARAAAARRRKPRPPPPPPPPPEESCPAKPVAPGPCFGGRTLEEIWRAATPTLTTFPTIRVGSDVWGERSLAAARRRARQVLRVNLEPMVRLRRFPVPRA

SEQ ID NO: 60 - DNA, 1689 bp, Homo sapiens
  CDS (110)..(814)
aagtagcgagagacgccagcagcagccgccgccgcggagccaacgcggactgggacggcggcggcagtagtgggacccggcgagcgtgagtggcccggagcggccttcgatgcggcgcagtatgaagaggcggcggcgccggcgcccggtcgccccggccacggccgcccggggcggcgactttagggcagaagacggggctgggttggaggcgcgggaggagaaggtggtgtactcgcggtcgcaactgtcgctggctgacagcaccaaggcgctgggcgacgccttcaagctcttcatgccccgcagcacggagttcatgagctcggacgcggagctctggagcttcctctgcagcctcaagcaccagttctccccgcacatcctgcgcagcaaggacgtctacggctactcctcctgccgggccctggtacccgaccccccggggccccctacagcccgcggccaggcgcgccggccggttccgcgcgcagcggccaggaggaggcgccgcggagcccgggcggccgctgcccgcaggaggaagccccggccgccacccccaccgccgccgccccccgaggagagctgcccggccaagcccgtggcccccgggccctgcttcgggggccgcaccttggaggagatctggagggcggccaccccgacgctgaccaccttccccaccatccgcgtcggcagcgacgtgtggggcgagcgcagcctggcggcagcgcggcgcagggcgcgccaggtcctgcgagtgaacctggaacccatggtgaggctccgccgcttcccggtgccccgggcatgaggtgcggcctccagggcgcctcctgccggccccgaccttgggacaggccttccgcccggaggaatgaacaagtgtcagtcgagtgtttacagatccggccaggaccccggcccccaatgcactttacgcgcgaagaagttgccggatggttgtccctgtcccgggccgcggcgcggtcgtcttggacgctggggcaggtgtgccctctgctgcctcccgtacccggcctgcggagggaggggacagctggacccgcaggggaggtccctttcttcctgaccaccgattgagacgtctccaggaccttaggggcagatccgttttctcactgttggactctacctcactggtctggaagtcctccgaagacattatttttccaaaggaatttggtttcgtgcttgtgtaataaagccagaatttacttgttctttatctccccctttttctatttcactgtcacccctctttgtggacagaagttcgaacatgtggtgttgcactagtttgtgctcagggtattctgaagcccactcgtttcctaatttttactggattccaaagctttgatcgaggatattttttaagaggttcaagcttgtgactgttagtagtgcaaggatttgtatgggctcagtgattacaaacaaagacatgcaaaatacaactgtttaaacattttcaaggtatttttaaaggttttgtattgaaacaatgtttatatttactgagctcctaaaaatggtagaatacacatgaaaacttttgtttaggaaaagttaacttgttaaattcttttgaattgaataaaaaaatgcattgaaaccatatggtgtgtgattaaaaaaaatgaataaattgtgaagaactgg

SEQ ID NO: 61 - protein, 204 aa, Homo sapiens
MMPSCNRSCSCSRGPSVEDGKWYGVRSYLHLFYEDCAGTALSDDPEGPPVLCPRRPWPSLCWKISLSSGTLLLLLGVAALTTGYAVPPKLEGIGEGEFLVLDQRAADYNQALGTCRLAGTALCVAAGVLLAICLFWAMIGWLSQDTKAEPLDPEADSHVEVFGDEPEQQLSPIFRNASGQSWFSPPASPFGQSSVQTIQPKRDS

SEQ ID NO: 62 - DNA, 1992 bp, Homo sapiens
  CDS (152)..(763)
ttttgctcggcggagacagcaggcagagagatgaggaaactgagacccagaaaggtggaagcacttgtctaaggtcacgcctccaggaagcagtgtgtccacgactccagtccaagtggtcaggctccagagcccacagtcccaggggtccatgatgccgagctgcaatcgttcctgcagctgcagccgcggccccagcgtggaggatggcaagtggtatggggtccgctcctacctgcacctcttctatgaggactgtgcaggcactgctctcagcgacgaccctgagggacctccggtcctgtgcccccgccggccctggccctcactgtgttggaagatcagcctgtcctcggggaccctgcttctgctgctgggtgtggcggctctgaccactggctatgcagtgccccccaagctggagggcatcggtgagggtgagttcctggtgttggatcagcgggcagccgactacaaccaggccctgggcacctgtcgcctggcaggcacagcgctctgtgtggcagctggagttctgctcgccatctgcctcttctgggccatgataggctggctgagccaggacaccaaggcagagcccttggaccccgaagccgacagccacgtggaggtcttcggggatgagccagagcagcagttgtcacccattttccgcaatgccagtggccagtcatggttctcgccacccgccagcccctttgggcaatcttctgtgcagactatccagcccaagagggactcctgagctgcccacatggcctaagatgtgggtcctggatccttccccccttctcaccataaccccctctcagtgtttccccaacttctcccttttagcagggtccctttagagcccaactccaggtcaaatctggagctcaaatcccagtgctccctccccaggagtggggccccaactcttccaagataccagcattcctcaagtcctcccaaaacttcctacccacaccctcttcccaaggccctcaggggcagaaaacatctccttcaacccatccccactccttcctctgcatgaccttgggcaaacccttgccctttcaagccatcagctcctgcctctctgccatgagggctttggatcagattcctcttctcgccaggatgaggacacgcactgccctccatagacacagatgaaggggtgggggtcattcagctcgaatgggtcccagatgctcacttggcctttccctgcaggatgagtgaagacgtttgcctctcacagtgtgtcttctacctgcattttggcatcagagccccccagcccacccaccacaggcaattactagccctagttgataggtgaggtgggtgaagaaggctggaggtgacatgtccgaggtcacacaacaaagcagcatgcaggaactagaaacacatcttcagcctcctcctgggccagctcttgtgctacaggtggggcggagccagcccctcaccttcctggttccctgagggtcctcagggtggaggacaggtttggcccagaaagactagccagaggcctgatggtcccaggtggctctggatatactttggatatggatttaaatggtctctaagagccgggggtagggggcaggaaaagtgggttgtctttgcccctcaaagtccacctacctagaaaccaagcccacggtcttggccgtgaccctgatgataaatgtgctctctcagaggcgccagcccctccctccccagccggaggcgtcatctctcttctgtaccactagagggagctctgatgcagctggagagcagcgctcaaggctctcgcccctcccctccctaacccttaccttcagtctccaccagcctgaagggcctcctaggggatcctcaggcggcccccaccagggcacaccctactgtccttgtgcctcacgccccctcctcatcctgcaccccttccatcccaccttccctttcaataaacagctgggatgg

SEQ ID NO: 63 - protein, 68 aa, Homo sapiens
MVMQILPESIWNALCIARFITFSATSSCPVSQNKKSTFECYTFKAHWNMDYFIICWYIVFIMQCHHNW

SEQ ID NO: 64 - DNA, 2514 bp, Homo sapiens
  CDS (635)..(838)
ctgaatgtgtattgcttttgcaccattgcaaagtcaaaatttataagttgaaccatcgtaaattgggggactgtatgctgttgcctgcattaaatgcatcttagtattttttcagatgtaacctcattgtaggttgagcaaccgtatagtgtaacttttgtagaggaacattttgacttttactgggtctaagttttacttttttattttgttccagacagtctcaatgtttgtaaagtctaggttccagatgtaagatatttggctgatattttagtgttactgagccattatttaattacagactcatatattctgttaaatctactagagcaagggttgtcaaactatggcccgtagccagaatcagcttgctgcctgtttttgtgtggcccatgaactgaaaatggcttttaaatggttgggaaaaataatcaaaagattatttcctgacatctgaaaattacatgaaattcaaattttagtgtctataagtttttattggaatgcagccacactaatttacatattatctatggatacttttttgctataatgggaaagttgagtagctgctacagaacctgtgtatgtgtgtcttgtttcacattgccgcttggcaagctacagaatcatggtgatgcagatattacctgaaagcatttggaatgccctgtgtattgctagatttattactttttctgctaccagttcatgccctgtatctcagaacaagaaaagtacctttgaatgttacactttcaaggcacactggaatatggactattttattatatgctggtacattgtgtttataatgcagtgtcaccataactggtaaaagaatagactgacagtatcagactaacatcacaatattcccaactggtgggaaagcaacagtcagaagaattagaaaatttaaatgaaacatcacagcaaaatttcacaaaagtaataaaaatgaggctgcaaccaaaatgtttacaagtagcctatttgttagccaagcaaagaaaaccatttactaatgctgaattacatcgtgcttgaagatagtaaccaacccaaagacatgtgtccagagaaaattaagacatcagccctttgatgagaacagtagtttgaagaatgaggattttggacacaacatcaaatgacactgttaattctttgcctcttactagtcagtactgcctagctttatgttttgagaaaccattgctggatttgaagtgatcgaagaatttgtatggaactacaagtgggaatattttcaaaaaagttgataaacagtacaacctgaagtggaatctactaagatgtgatgcaaccgatgctgggaaaaatgcatgaagcagaaaaaaagtttatttggtcaaattttaaggcttgtgaaaatgtaagttgtttaaagcctgtagttactcacttgattattcatcagcaggtacttcacaggaaatattggtgttactgaactggtcaacagttaacttcatttgctcttgtggacttaaccatcttcagttccatgattttttttttttttgtgagaaacagaagctgaatatcctgatttgatttgccacacaggcgttcaatggcttagcagtgctaaagatttatttttatttttttgggctctgggctgacattgaaatttttctgaatgagaaaaaccatcctcaaccactgttttttaacactgagtaactttggaaattaacttttgccacagacttgaaaatgtttcttaatgaatttgacctgaaattacaaggtacaacaacataatatggtaaattcatttcaataaaaactaaaacttaagattgtcaagctgctttatatactttctgtgctatgagaagtcaaaacagcgctgtattgccaaatccatttttagtggatatattttcctgtagcagttttttggaccttgatgcagtgcaaagaaaatttttaaattttaaaagcatttaactgcaattaaatgcttttaaagtttcctcttaatcttctgttggaaatgaatcatcttgaatgaatgacatgctaaagggcaaataccaaaaagatgaatcctacaaatgccttacaagtgatgaatatgcttaactaaaatcacatgctcatgggtggatgtgtcagtatttagcagtaccttgacctgtttgtttgtgtgaaaagacattttcaaagatgaaatacgtgaaatcccattacacatcagcattaacagattaacattttctatttattccaatgaggggataccaactttcagcccaaattgagcaaaatgttacctcccgtcccctgccaaaaaatcccattattcccattagtagaactctattactaaaaaaagaaaaaaaaattgtactcaatattttgagttttcaatttttagaataaaaatttggtgaaaagtttccttgagtacctaaataatgtccttcattttgtcttagcttgcaaagcctctaatatttgctacctgcccttttc

SEQ ID NO: 65 - protein, 178 aa, Homo sapiens
MEARFTRGKSALLERALARPRTEVSLSAFALLFSELVQHCQSRVFSVAELQSRLAALGRQVGARVLDALVAREKGARRETKVLGALLFVKGAVWKALFGKEADKLEHAQLRQLHGGHRGGGAHTQRLPCQGHGALAQGHHAHDQVRGGSHRSRPGPGGPLTLPEIKDTESPSKKKKKK

SEQ ID NO: 66 - DNA, 584 bp, Homo sapiens
  CDS (51)..(584)
gtaaagcagctcggccgagcagactgctgcggttcctgggtggcggcggcatggaggcgcgcttcacgcgcgggaagtcggcgctgctggagcgcgcgctggcgcggccgcgcaccgaggtgagcctgagcgccttcgcactgctgttctccgagctggtacagcactgccagagccgcgtcttctccgtggccgagctgcagtcgcgcctggccgcgctgggccgccaggtgggcgcgcgcgtgctggatgcgctggtggcgcgcgaaaagggtgcccggcgtgagaccaaggtgctaggggcgttgctcttcgtcaagggcgccgtgtggaaggcgctcttcggcaaggaggcggacaagctggagcacgctcaactgcgccagcttcacggcgggcatcgtggaggcggtgctcacacacagcggcttccctgccaaggtcacggcgcactggcacaagggcaccacgctcatgatcaagttcgaggaggcagtcatcgctcgagaccgggccctggagggccgctgaccctgccggagataaaggatacagagagcccctcaaaaaaaaaaaaaaaaaaa

SEQ ID NO: 67 - protein, 188 aa, Homo sapiens
MEARFTRGKSALLERALARPRTEVSLSAFALLFSELVQHCQSRVFSVAELQSRLAALGRQVGARVLDALVAREKGARRETKVLGALLFVKGAVWKALFGKEADKLEQANDDARTFYIIEREPLINTYISVPKENSTLNCASFTAGIVEAVLTHSGFPAKVTAHWHKGTTLMIKFEEAVIARDRALEGR

SEQ ID NO: 68 - DNA, 651 bp, Homo sapiens
  CDS (51)..(614)
gtaaagcagctcggccgagcagactgctgcggttcctgggtggcggcggcatggaggcgcgcttcacgcgcgggaagtcggcgctgctggagcgcgcgctggcgcggccgcgcaccgaggtgagcctgagcgccttcgcactgctgttctccgagctggtacagcactgccagagccgcgtcttctccgtggccgagctgcagtcgcgcctggccgcgctgggccgccaggtgggcgcgcgcgtgctggatgcgctggtggcgcgcgaaaagggtgcccggcgtgagaccaaggtgctaggggcgttgctcttcgtcaagggcgccgtgtggaaggcgctcttcggcaaggaggcggacaagctggagcaggccaacgatgacgcgcgcaccttctacatcatcgagcgcgagccgctcatcaacacctacatctccgtgcccaaggagaacagcacgctcaactgcgccagcttcacggcgggcatcgtggaggcggtgctcacacacagcggcttccctgccaaggtcacggcgcactggcacaagggcaccacgctcatgatcaagttcgaggaggcagtcatcgctcgagaccgggccctggagggccgctgaccctgccggagataaaggatacagagagcccctc

SEQ ID NO: 69 - DNA, 1343 bp, Homo sapiens
  CDS (31)..(687)
agtgtttgggtttcttcgcggctgctcaagatgaaccgactcttcgggaaagcgaaacccaaggctccgccgcccagcctgactgactgcattggcacggtggacagtagagcagaatccattgacaagaagatttctcgattggatgctgagctagtgaagtataaggatcagatcaagaagatgagagagggtcctgcaaagaatatggtcaagcagaaagccttgcgagttttaaagcaaaagaggatgtatgagcagcagcgggacaatcttgcccaacagtcattcaacatggaacaagccaattataccatccagtctttgaaggacaccaagaccacggttgatgctatgaaactgggagtaaaggaaatgaagaaggcatacaagcaagtgaagatcgaccagattgaggatttacaagaccagctagaggatatgatggaagatgcaaatgaaatccaagaagcactgagtcgcagttatggcaccccagaactggatgaagatgatttagaagcagagttggatgcactaggtgatgagcttctggctgatgaagacagttcttatttggatgaggcagcatctgcacctgcaattccagaaggtgttcccactgatacaaaaaacaaggatggagttctggtggatgaatttggattgccacagatccctgcttcatagatttgcatcattcaagcatatcttgtaaaacaaacacatattatgggactaggaaatatttatctttccaaatttgccataacagatttaggtttctttcctttctttgaaggaaagtttaattacattgctcttttattttttccattaagagactcattgcttgggaaatgctttcttcgtactaaaatttgattcctttttttcttatgaaaaacgaactcagtttaaaagtatttttagctcgtatgacttgttttcattcattaataataatttgaaataaaactaaggaaatggaatcttaaaagtctatgacagtgtaactctacagtctcaaaatgacctgataaattgataagacaaagatgagattattggggctgttcatattatgattcagaatcattttctattgtggtattataggttggttaaagtgatggcctttttgatgggttttgttgtgtcttgtgaacaagtcgttactgtgtccattattggaatggaattatcactactgtatcatgagtgggtattttgattctatggttccctcagtattacatcttgacttgtaatcaattatgaatatttcttgatatttaatgtataggacatttatttatactcaataaatatttttcaaaagg

SEQ ID NO: 70 - protein, 219 aa, Homo sapiens
MNRLFGKAKPKAPPPSLTDCIGTVDSRAESIDKKISRLDAELVKYKDQIKKMREGPAKNMVKQKALRVLKQKRMYEQQRDNLAQQSFNMEQANYTIQSLKDTKTTVDAMKLGVKEMKKAYKQVKIDQIEDLQDQLEDMMEDANEIQEALSRSYGTPELDEDDLEAELDALGDELLADEDSSYLDEAASAPAIPEGVPTDTKNKDGVLVDEFGLPQIPAS

SEQ ID NO: 71 - DNA, 1642 bp, Homo sapiens
  CDS (266)..(1642)
agttggcggaagagatcgagctccctggctgccggctcgccttctgcgtggagttctcgcggtctgggtttcgctgtctgctcttggcccggggtcattttgtcggcgtcgggtgccctctcttgcccagctggggcacagcgaggcggccccttctcccgacgacgttcgatggagtagggtcccagaccgttgtcccgaagagcgagatcgagcttggccccctcccccccctccttccctccctccttccttccgccgcaacatggctaacaacagccccgcgctgacaggcaactcgcagccgcagcaccaggcggctgcagctgcggctcagcaacagcagcagtgcggcggcggcggcgctaccaagccggcggtctccggcaagcagggcaatgtgctcccgctctggggcaacgagaagaccatgaacctcaaccccatgatcctgaccaacatcctgtcgtcgccttacttcaaagtacagctctacgagctcaagacctaccacgaggtggtggacgagatctactttaaggtcacgcacgttgaaccatgggagaaaggaagcaggaaaacagcgggccagacagggatgtgcggaggggttcgaggtgttggaacaggaggaattgtttctacagcattttgcctgttatacaaattatttaccctgaagttaactcgaaagcaagtgatgggtcttataacacacacagactctccatatattagagcgcttggatttatgtatataagatatacacagccccctacagatctgtgggactggtttgaatccttccttgatgatgaagaggacctagatgtgaaggctggtggaggctgtgtaatgaccattggagaaatgctacgatcttttctcacaaaactggagtggttttctaccttgtttccaagaattccagttccagttcaaaagaatattgatcaacagattaaaacccgacctagaaaaatcaagaaagatgggaaggaaggtgctgaggaaatagacagacatgttgaacgcagacgttcaaggtctccaaggagatctctgagtccacggaggtccccaagaaggtcaagaagtagaagtcatcatcgggagggccatgggtcttctagttttgacagagaattagaaagagagaaagaacgccagcgactagagcgtgaagccaaagaaagggagaaagaacggcgaagatcccgaagtattgaccgggggttagaacgcaggcgcagcagaagtagggaaaggcatagaagtcgcagtcgaagtcgtgataggaaaggggatagaagggacagggatcgagaaagagagaaagaaaatgagagaggtagaagacgagatcgtgactatgataaggaaagaggaaaagaacgagaaaaagagagagagcgatcaagagaaaggtccaaggaacagagaagtaggggagaggtagaagagaagaaacataaagaagacaaagatgataggcggcacagagatgacaaaagagattccaagaaagagaaaaaacacagtagaagcagaagcagagaaaggaaacacagaagtaggagtcgaagtagaaatgcagggaaacgaagtagaagtagaagcaaagagaaatcaagtaaacat

SEQ ID NO: 72 - protein, 459 aa, Homo sapiens
MANNSPALTGNSQPQHQAAAAAAQQQQQCGGGGATKPAVSGKQGNVLPLWGNEKTMNLNPMILTNILSSPYFKVQLYELKTYHEVVDEIYFKVTHVEPWEKGSRKTAGQTGMCGGVRGVGTGGIVSTAFCLLYKLFTLKLTRKQVMGLITHTDSPYIRALGFMYIRYTQPPTDLWDWFESFLDDEEDLDVKAGGGCVMTIGEMLRSFLTKLEWFSTLFPRIPVPVQKNIDQQIKTRPRKIKKDGKEGAEEIDRHVERRRSRSPRRSLSPRRSPRRSRSRSHHREGHGSSSFDRELEREKERQRLEREAKEREKERRRSRSIDRGLERRRSRSRERHRSRSRSRDRKGDRRDRDREREKENERGRRRDRDYDKERGKEREKERERSRERSKEQRSRGEVEEKKHKEDKDDRRHRDDKRDSKKEKKHSRSRSRERKHRSRSRSRNAGKRSRSRSKEKSSKH

SEQ ID NO: 73 - DNA, 3427 bp, Homo sapiens
  CDS (266)..(1903)
agttggcggaagagatcgagctccctggctgccggctcgccttctgcgtggagttctcgcggtctgggtttcgctgtctgctcttggcccggggtcattttgtcggcgtcgggtgccctctcttgcccagctggggcacagcgaggcggccccttctcccgacgacgttcgatggagtagggtcccagaccgttgtcccgaagagcgagatcgagcttggccccctcccccccctccttccctccctccttccttccgccgcaacatggctaacaacagccccgcgctgacaggcaactcgcagccgcagcaccaggcggctgcagctgcggctcagcaacagcagcagtgcggcggcggcggcgctaccaagccggcggtctccggcaagcagggcaatgtgctcccgctctggggcaacgagaagaccatgaacctcaaccccatgatcctgaccaacatcctgtcgtcgccttacttcaaagtacagctctacgagctcaagacctaccacgaggtggtggacgagatctactttaaggtcacgcacgttgaaccatgggagaaaggaagcaggaaaacagcgggccagacagggatgtgcggaggggttcgaggtgttggaacaggaggaattgtttctacagcattttgcctgttatacaaattatttaccctgaagttaactcgaaagcaagtgatgggtcttataacacacacagactctccatatattagagcgcttggatttatgtatataagatatacacagccccctacagatctgtgggactggtttgaatccttccttgatgatgaagaggacctagatgtgaaggctggtggaggctgtgtaatgaccattggagaaatgctacgatcttttctcacaaaactggagtggttttctaccttgtttccaagaattccagttccagttcaaaagaatattgatcaacagattaaaacccgacctagaaaaatcaagaaagatgggaaggaaggtgctgaggaaatagacagacatgttgaacgcagacgttcaaggtctccaaggagatctctgagtccacggaggtccccaagaaggtcaagaagtagaagtcatcatcgggagggccatgggtcttctagttttgacagagaattagaaagagagaaagaacgccagcgactagagcgtgaagccaaagaaagggagaaagaacggcgaagatcccgaagtattgaccgggggttagaacgcaggcgcagcagaagtagggaaaggcatagaagtcgcagtcgaagtcgtgataggaaaggggatagaagggacagggatcgagaaagagagaaagaaaatgagagaggtagaagacgagatcgtgactatgataaggaaagaggaaatgaacgagaaaaagagagagagcgatcaagagaaaggtccaaggaacagagaagtaggggagaggtagaagagaagaaacataaagaagacaaagatgataggcggcacagagatgacaaaagagattccaagaaagagaaaaaacacagtagaagcagaagcagagaaaggaaacacagaagtaggagtcgaagtagaaatgcagggaaacgaagtagaagtagaagcaaagagaaatcaagtaaacataaaaatgaaagtaaagaaaaatcaaataaacgaagtcgaagtggcagtcaaggaagaactgacagtgttgaaaaatcaaaaaaacgggaacatagtcccagcaaagaaaaatctagaaagcgtagtagaagcaaagaacgttcccacaaacgagatcacagtgatagtaaggaccagtcagacaaacatgatcgtcgaaggagccaaagtatagaacaagagagccaagaaaaacagcataaaaacaaagatgagactgtgtgaaaatattttgtaaaagtggatcacattgaatcctataaatgattaaatctgcttttttcccccacgttgagattgtgcagtagttcgcactcctcaagctctccctgtaggctgcattttcatttcctctttcgtgtagggaagtgcctttgtaattccatttattgcattggtgttttcacccaattgttaagtttgatacatgatgcacagattgttcttgcatttttattgtttgtttttgaaatgtacagtctgtacatatgtcctgaaaatgttttaattcctttggcatggttgccatgttggttaaatttgtataaggcaataaactgccactaatctatttttgttttgtaggtgtgggattatggtttgtgtactgaagttagcatggctgtgcttttcgtaatagaatgctaaagactttgagaatggatcttggatgtctattataggagaagtatgtgctgccaatgtacaagaaggcagcattgtaggattaacattcttgtctactgtatattatcttggaaggctcttgttaatatgttacacttaatattctccacagttacctttagagagaatttatgagaagttagtttctgatgcagaggtttttaggctgtgatttcatcaaaagtccttttagcattctacctcaaagggacacttagtatgcctaaaatttattcacttagttttccttttttatttgaaaaaatacatgacatgtaatctttttttcttgaattctttctcagattttaaagtactatattaaagaaaaaaattaatgtctaaagcctagcattcttgcagaaccctatactaacatgtaatggggagagggtggggcagatgagtagagaaacagattcaagcctcaagcttccaaagcatttttataaatggaaaatccttaaattatgaaacagcttgatatagtgtcctttttttaaaattcagaactttttttattgataatggagattgctgtttgagtttttaaacttaatctagaacagaggagtattaaaagtaatgctgtgctgcattatttaagactatcagcaaattatttgatagattgttcttacaacttgtattctgattacagaaccatcatgagtgtggaataaatactggattaaatcctttatcctgggtcttggcttttcccccatttgttaaatttttttagcatatttatattgtggaaattgatgaaacgtcagtagagtcacactttgtgtacagggatgtcttagtgcccagatgacaagtgaattttggagaaatgcatagactgggattgggcatgtggtaatcaataatctttattagaatacttgataatggcagttccctttgtcagtggttgttacatgtgtcatttgattactttgttccatgtcaaagacgtttattgggataccttttacttggacaatatgttagcattttttaaaatttggacttgaaattctttaagataattcacccaattctttttag

SEQ ID NO: 74 - protein, 546 aa, Homo sapiens
MANNSPALTGNSQPQHQAAAAAAQQQQQCGGGGATKPAVSGKQGNVLPLWGNEKTMNLNPMILTNILSSPYFKVQLYELKTYHEVVDEIYFKVTHVEPWEKGSRKTAGQTGMCGGVRGVGTGGIVSTAFCLLYKLFTLKLTRKQVMGLITHTDSPYIRALGFMYIRYTQPPTDLWDWFESFLDDEEDLDVKAGGGCVMTIGEMLRSFLTKLEWFSTLFPRIPVPVQKNIDQQIKTRPRKIKKDGKEGAEEIDRHVERRRSRSPRRSLSPRRSPRRSRSRSHHREGHGSSSFDRELEREKERQRLEREAKEREKERRRSRSIDRGLERRRSRSRERHRSRSRSRDRKGDRRDRDREREKENERGRRRDRDYDKERGNEREKERERSRERSKEQRSRGEVEEKKHKEDKDDRRHRDDKRDSKKEKKHSRSRSRERKHRSRSRSRNAGKRSRSRSKEKSSKHKNESKEKSNKRSRSGSQGRTDSVEKSKKREHSPSKEKSRKRSRSKERSHKRDHSDSKDQSDKHDRRRSQSIEQESQEKQHKNKDETV

SEQ ID NO: 75 - DNA, 1672 bp, Homo sapiens
  CDS (186)..(1364)
attttgaatgtgcagctgcagcgggcgtgagttgggggaggacgggttgccgactcgcctacctagcggtctcttgattgtcgatattttgttggcataggtttatgtagagacgtatacatatatatagacacactgtctttaaatctaggcctgtatccggtgtccgaggcgaactcagtaagatgatgttaagaggaaacctgaagcaagtgcgcattgagaaaaacccggcccgccttcgcgccctggagtccgcggtgggcgagagcgagccggcggccgcggcagccatggcgctcgctcttgccggggagccggcaccgcccgcgcccgcgcctccagaggaccacccggacgaggagatggggttcactatcgacatcaagagtttcctcaagccgggcgagaagacgtacacgcagcgctgccgcctcttcgtgggaaatctgcccaccgacatcacggaggaggacttcaagaggctcttcgaacgctatggcgagcccagcgaagtcttcatcaaccgggaccgtggcttcggcttcatccgcttggaatccagaaccctggctgaaattgcaaaagcagagctggacggcaccattctcaagagcagacctctacggattcgcttcgctacacatggagcagccttgactgtcaagaacctttctccagttgtttccaatgagctgctagagcaagcattttctcagtttggtccagtagagaaagctgttgtggttgtggatgatcgcggtagagctacaggaaaaggttttgtagagtttgcagcaaaacctcctgcacgaaaggctctggaaagatgtggtgatggggcattcttgctaacaacgacccctcgtccagtcattgtggaacccatggagcagtttgatgatgaagatggcttgccagagaagctgatgcagaaaactcaacaatatcataaggaaagagaacaaccaccacgttttgctcaacctgggacatttgaatttgagtatgcatctcgatggaaggctcttgatgaaatggaaaagcagcagcgtgagcaggttgatagaaacatcagagaagccaaagagaaactggaggcagaaatggaagcagctaggcatgaacaccaattaatgctaatgaggcaagatctaatgaggcgtcaagaagaactcagacgcttggaagaactcagaaaccaagagttgcaaaaacggaagcaaatacaactaagacatgaagaggagcatcggcggcgtgaggaagaaatgatccgacacagagaacaggaggaactgaggcgacagcaagagggctttaagccaaactacatggaaaatggtgataaaagaaaatgtggctgaagttacccgaagttcagcttgcagtgtaattcagaagagttaagaccagaagtactggaatcatacttcctttcagtcttgccacttgcctagtgaggcttttccgaacctggaaggagacgtctagaaatcccaactttgctgtgtaaggaccattagctgcaagtcagtggaagtctatagaaagcagtgtgaattccatagtggtcttgacttcttagcaaggatttgggataagtctaaaacttcagacttaaagctttgaagcatgttaactgcatgaaatattaaacatttcgaacttc

SEQ ID NO: 76 - protein, 393 aa, Homo sapiens
MMLRGNLKQVRIEKNPARLRALESAVGESEPAAAAAMALALAGEPAPPAPAPPEDHPDEEMGFTIDIKSFLKPGEKTYTQRCRLFVGNLPTDITEEDFKRLFERYGEPSEVFINRDRGFGFIRLESRTLAEIAKAELDGTILKSRPLRIRFATHGAALTVKNLSPVVSNELLEQAFSQFGPVEKAVVVVDDRGRATGKGFVEFAAKPPARKALERCGDGAFLLTTTPRPVIVEPMEQFDDEDGLPEKLMQKTQQYHKEREQPPRFAQPGTFEFEYASRWKALDEMEKQQREQVDRNIREAKEKLEAEMEAARHEHQLMLMRQDLMRRQEELRRLEELRNQELQKRKQIQLRHEEEHRRREEEMIRHREQEELRRQQEGFKPNYMENGDKRKCG

SEQ ID NO: 77 - DNA, 1709 bp, Homo sapiens
  CDS (188)..(1366)
attttttgaatgtgcagctgcagcgggcgtgagttgggggaggacgggttgccgactcgcctacctagcggtctcttgattgtcgatattttgttggcataggtttatgtagagacgtatacatatatatagacacactgtctttaaatctaggcctgtatccggtgtccgaggcgaactcagtaagatgatgttaagaggaaacctgaagcaagtgcgcattgagaaaaacccggcccgccttcgcgccctggagtccgcggtgggcgagagcgagccggcggccgcggcagccatggcgctcgctcttgccggggagccggcaccgcccgcgcccgcgcctccagaggaccacccggacgaggagatggggttcactatcgacatcaagagtttcctcaagccgggcgagaagacgtacacgcagcgctgccgcctcttcgtgggaaatctgcccaccgacatcacggaggaggacttcaagaggctcttcgaacgctatggcgagcccagcgaagtcttcatcaaccgggaccgtggcttcggcttcatccgcttggaatccagaaccctggctgaaattgcaaaagcagagctggacggcaccattctcaagagcagacctctacggattcgcttcgctacacatggagcagccttgactgtcaagaacctttctccagttgtttccaatgagctgctagagcaagcattttctcagtttggcccagtagagaaagctgttgtggttgtggatgatcgcggtagagctacaggaaaaggttttgtagagtttgcagcaaaacctcctgcacgaaaggctctggaaagatgtggtgatggggcattcttgctaacaacgacccctcgtccagtcattgtggaacccatggagcagtttgatgatgaagatggcttgccagagaagctgatgcagaaaactcaacaatatcataaggaaagagaacaaccaccacgttttgctcaacctgggacatttgaatttgagtatgcatctcgatggaaggctcttgatgaaatggaaaagcagcagcgtgagcaggttgatagaaacatcagagaagccaaagagaaactggaggcagaaatggaagcagctaggcatgaacaccaattaatgctaatgaggcaagatctaatgaggcgtcaagaagaactcagacgcttggaagaactcagaaaccaagagttgcaaaaacggaagcaaatacaactaagacatgaagaggagcatcggcggcgtgaggaagaaatgatccgacacagagaacaggaggaactgaggcgacagcaagagggctttaagccaaactacatggaaaatggtgataaaagaaaatgtggctgaagttacccgaagttcagcttgcagtgtaattcagaagagttaagaccagaagtactggaatcatacttcctttcaggtcaaaacattttgtgggaaatatcctgttcgtgacctaggagaaacaagacagaaaacaaatctttcttcatttatgaatttcttactccatacaagcagtttatggatgtctgggcaatcatagcacttgccatttaaaaacatgctacaggggcacattttctgtggttaaaaatgatctccagaataagtgtaaactgcagttttcctttgcattgagggttttggctttttatttgtaaattaaatcaagatgttaccc

SEQ ID NO: 78 - protein, 393 aa, Homo sapiens; identical to SEQ ID NO: 76

SEQ ID NO: 79 - DNA, 2307 bp, Homo sapiens
  CDS (281)..(1324)
actttgtttatgggacagtccgggagctgctgcggccgcgctgtctgcttctcctgcgcctccttttcgcccagcactagcgccttaggccagctcgggggatgtgagagccgaagcccttagactgccaggcacagagtcgggtcgggatttgtcagccaagcctcggctccagctccgcaatctcgggactcacccgagcgacccaggcccgacggcaagttcgggcgggacggcggccgccgcgcgctcaggctcagcttcgctgcccgcccagaagatgaatccggcctcggcgccccctccgctcccgccgcctgggcagcaagtgatccacgtcacgcaggacctagacacagacctcgaagccctcttcaactctgtcatgaatccgaagcctagctcgtggcggaagaagatcctgccggagtctttctttaaggagcctgattcgggctcgcactcgcgccagtccagcaccgactcgtcgggcggccacccggggcctcgactggctgggggtgcccagcatgtccgctcgcactcgtcgcccgcgtccctgcagctgggcaccggcgcgggtgctgcgggtagccccgcgcagcagcagcagtcctacgacgtgaccgacgagctgccactgcccccgggctgggagatgaccttcacggccactggccagaggtacttcctcaatcacatagaaaaaatcaccacatggcaagaccctaggaaggcgatgaatcggcctctgaatcatatgaacctccaccctgccgtcagttccacaccagtgcctcagaggtccatggcagtatcccagccaaatctcgtgatgaatcaccaacaccagcagcagatggcccccagtaccctgagccagcagaaccaccccactcagaacccacccgcagggctcatgagtatgcccaatgcgctgaccactcagcagcagcagcagcagaaactgcggcttcagagaatccagatggagagagaaaggattcgaatgcgccaagaggagctcatgaggcagctagatgaggaagaggagcgaaggaaaaggcgccgggagaagaacaaagtcgcagcagcccgatgccggaacaagaagaaggagcgcacggagtttctgcagcgggaatccgagcggctggaactcatgaacgcagagctgaagacccagattgaggagctgaagcaggagcggcagcagctcatcctgatgctgaaccgacaccgccccacctgcatcgtccggaccgacagtgtcaagacccccgagtcagaaggcaacccactgctcgagcagctcgagaagaagtgaccatgggctgggaggaggtggaggaggaggaagaggagaaggaaaagtgacgaagagagaggaggaggggggccccagatggcccttcctttggtgcatgaaaaactgtacaatgaggttcagcacagccagcatcagccgagcttttttgtgaaactcagatcagccacccaggaggaagagcgggctgaggaaacccagagggaccaagcgctgagaccaaagttgaccctcgggtagggttgtcctgcctggggccccacttgaaggaggcaggacagaggcaccgaggccagggagacgcccaacgaggcagccctgggctcttctctggcctcctcaccagggcacccatccaaggaacctccgaacagccaggaaaagccatgagttgcaaccaaaacgcggctgaggatggaactcagaatgaaactgcaacccacctgcccccagccctgcccctcgccctgatgcgaagctggagaggggcgtgctgcggggccctgatgcccccacccacctcggtccagcgcggccctgcccaggaggcggcagccgggcgcaccctcgccagccctgctggagtttgctgtgggcactgaggcgcgggcgcccttccaaagcacatactcaccgaatgtttacagactggctgtcctggcagggctttcaactgcacatgttttttatactttcctttttttttttttttttaatattttttacaaaaaaaagattttatacaagcaatatatatatggatttctataatcactcgatgtgatacagtataaatatgctatggtttgtttgttatgaacagatagccaccagttacggccattgtgtgtaactcctaagtactgtagtctctgggtgtcgggggtggccagggcgggggcggggtgcatttccatccttgtaaacccttcatagtactcagtcctgtatcgctcagtaaacattgctcttacttacat

SEQ ID NO: 80 - protein, 348 aa, Homo sapiens
MNPASAPPPLPPPGQQVIHVTQDLDTDLEALFNSVMNPKPSSWRKKILPESFFKEPDSGSHSRQSSTDSSGGHPGPRLAGGAQHVRSHSSPASLQLGTGAGAAGSPAQQQQSYDVTDELPLPPGWEMTFTATGQRYFLNHIEKITTWQDPRKAMNRPLNHMNLHPAVSSTPVPQRSMAVSQPNLVMNHQHQQQMAPSTLSQQNHPTQNPPAGLMSMPNALTTQQQQQQKLRLQRIQMERERIRMRQEELMRQLDEEEERRKRRREKNKVAAARCRNKKKERTEFLQRESERLELMNAELKTQIEELKQERQQLILMLNRHRPTCIVRTDSVKTPESEGNPLLEQLEKK

SEQ ID NO: 81 - DNA, 2322 bp, Homo sapiens
  CDS (281)..(1339)
actttgtttatgggacagtccgggagctgctgcggccgcgctgtctgcttctcctgcgcctccttttcgcccagcactagcgccttaggccagctcgggggatgtgagagccgaagcccttagactgccaggcacagagtcgggtcgggatttgtcagccaagcctcggctccagctccgcaatctcgggactcacccgagcgacccaggcccgacggcaagttcgggcgggacggcggccgccgcgcgctcaggctcagcttcgctgcccgcccagaagatgaatccggcctcggcgccccctccgctcccgccgcctgggcagcaagtgatccacgtcacgcaggacctagacacagacctcgaagccctcttcaactctgtcatgaatccgaagcctagctcgtggcggaagaagatcctgccggagtctttctttaaggagcctgattcgggctcgcactcgcgccagtccagcaccgactcgtcgggcggccacccggggcctcgactggctgggggtgcccagcatgtccgctcgcactcgtcgcccgcgtccctgcagctgggcaccggcgcgggtgctgcgggtagccccgcgcagcagcacgcgcacctccgccagcagtcctacgacgtgaccgacgagctgccactgcccccgggctgggagatgaccttcacggccactggccagaggtacttcctcaatcacatagaaaaaatcaccacatggcaagaccctaggaaggcgatgaatcagcctctgaatcatatgaacctccaccctgccgtcagttccacaccagtgcctcagaggtccatggcagtatcccagccaaatctcgtgatgaatcaccaacaccagcagcagatggcccccagtaccctgagccagcagaaccaccccactcagaacccacccgcagggctcatgagtatgcccaatgcgctgaccactcagcagcagcagcagcagaaactgcggcttcagagaatccagatggagagagaaaggattcgaatgcgccaagaggagctcatgaggcagctagatgaggaagaggagcgaaggaaaaggcgccgggagaagaacaaagtcgcagcagcccgatgccggaacaagaagaaggagcgcacggagtttctgcagcgggaatccgagcggctggaactcatgaacgcagagctgaagacccagattgaggagctgaagcaggagcggcagcagctcatcctgatgctgaaccgacaccgccccacctgcatcgtccggaccgacagtgtcaagacccccgagtcagaaggcaacccactgctcgagcagctcgagaagaagtgaccatgggctgggaggaggtggaggaggaggaagaggagaaggaaaagtgacgaagagagaggaggaggggggccccagatggcccttcctttggtgcatgaaaaactgtacaatgaggttcagcacagccagcatcagccgagcttttttgtgaaactcagatcagccacccaggaggaagagcgggctgaggaaacccagagggaccaagcgctgagaccaaagttgaccctcgggtagggttgtcctgcctggggccccacttgaaggaggcaggacagaggcaccgaggccagggagacgcccaacgaggcagccctgggctcttctctggcctcctcaccagggcacccatccaaggaacctccgaacagccaggaaaagccatgagttgcaaccaaaacgcggctgaggatggaactcagaatgaaactgcaacccacctgcccccagccctgcccctcgccctgatgcgaagctggagaggggcgtgctgcggggccctgatgcccccacccacctcggtccagcgcggccctgcccaggaggcggcagccgggcgcaccctcgccagccctgctggagtttgctgtgggcactgaggcgcgggcgcccttccaaagcacatactcaccgaatgtttacagactggctgtcctggcagggctttcaactgcacatgttttttatactttcctttttttttttttttttaatattttttacaaaaaaaagattttatacaagcaatatatatatggatttctataatcactcgatgtgatacagtataaatatgctatggtttgtttgttatgaacagatagccaccagttacggccattgtgtgtaactcctaagtactgtagtctctgggtgtcgggggtggccagggcgggggcggggtgcatttccatccttgtaaacccttcatagtactcagtcctgtatcgctcagtaaacattgctcttacttacat

SEQ ID NO: 82 - protein, 353 aa, Homo sapiens
MNPASAPPPLPPPGQQVIHVTQDLDTDLEALFNSVMNPKPSSWRKKILPESFFKEPDSGSHSRQSSTDSSGGHPGPRLAGGAQHVRSHSSPASLQLGTGAGAAGSPAQQHAHLRQQSYDVTDELPLPPGWEMTFTATGQRYFLNHIEKITTWQDPRKAMNQPLNHMNLHPAVSSTPVPQRSMAVSQPNLVMNHQHQQQMAPSTLSQQNHPTQNPPAGLMSMPNALTTQQQQQQKLRLQRIQMERERIRMRQEELMRQLDEEEERRKRRREKNKVAAARCRNKKKERTEFLQRESERLELMNAELKTQIEELKQERQQLILMLNRHRPTCIVRTDSVKTPESEGNPLLEQLEKK

SEQ ID NO: 83 - DNA, 1416 bp, Homo sapiens
  CDS (4)..(1203)
aagatgaatccggcctcggcgccccctccgctcccgccgcctgggcagcaagtgatccacgtcacgcaggacctagacacagacctcgaagccctcttcaactctgtcatgaatccgaagcctagctcgtggcggaagaagatcctgccggagtctttctttaaggagcctgattcgggctcgcactcgcgccagtccagcaccgactcgtcgggcggccacccggggcctcgactggctgggggtgcccagcatgtccgctcgcactcgtcgcccgcgtccctgcagctgggcaccggcgcgggtgctgcgggtagccccgcgcagcagcacgcgcacctccgccagcagtcctacgacgtgaccgacgagctgccactgcccccgggctgggagatgaccttcacggccactggccagaggtacttcctcaatcacatagaaaaaatcaccacatggcaagaccctaggaaggcgatgaatcagcctctgaatcatatgaacctccaccctgccgtcagttccacaccagtgcctcagaggtccatggcagtatcccagccaaatctcgtgatgaatcaccaacaccagcagcagatggcccccagtaccctgagccagcagaaccaccccactcagaacccacccgcagggctcatgagtatgcccaatgcgctgaccactcagcagcagcagcagcagaaactgcggcttcagagaatccagatggagagagaaaggattcgaatgcgccaagaggagctcatgaggcaggaagctgccctctgtcgacagctccccatggaagctgagactcttgccccagttcaggctgctgtcaacccacccacgatgaccccagacatgagatccatcactaataatagctcagatcctttcctcaatggagggccatatcattcgagggagcagagcactgacagtggcctggggttagggtgctacagtgtccccacaactccggaggacttcctcagcaatgtggatgagatggatacaggagaaaacgcaggacaaacacccatgaacatcaatccccaacagacccgtttccctgatttccttgactgtcttccaggaacaaacgttgacttaggaactttggaatctgaagacctgatccccctcttcaatgatgtagagtctgctctgaacaaaagtgagccctttctaacctggctgtaatcactaccattgtaacttggatgtagccatgaccttacatttcctgggcctcttggaaaaagtgatggagcagagcaagtctgcaggtgcaccacttcccgcctccatgactcgtgctccctcctttttatgttgccagtttaatcattgcctggttttgattgagagtaacttaagttaaacataaataaatattctattttcattttc

SEQ ID NO: 84 - protein, 400 aa, Homo sapiens
MNPASAPPPLPPPGQQVIHVTQDLDTDLEALFNSVMNPKPSSWRKKILPESFFKEPDSGSHSRQSSTDSSGGHPGPRLAGGAQHVRSHSSPASLQLGTGAGAAGSPAQQHAHLRQQSYDVTDELPLPPGWEMTFTATGQRYFLNHIEKITTWQDPRKAMNQPLNHMNLHPAVSSTPVPQRSMAVSQPNLVMNHQHQQQMAPSTLSQQNHPTQNPPAGLMSMPNALTTQQQQQQKLRLQRIQMERERIRMRQEELMRQEAALCRQLPMEAETLAPVQAAVNPPTMTPDMRSITNNSSDPFLNGGPYHSREQSTDSGLGLGCYSVPTTPEDFLSNVDEMDTGENAGQTPMNINPQQTRFPDFLDCLPGTNVDLGTLESEDLIPLFNDVESALNKSEPFLTWL

SEQ ID NO: 85 - DNA, 1494 bp, Homo sapiens
  CDS (33)..(1409)
atttccggttccggctgcgggccggtgaagatatggcggcgtctgcgtctgcagctgcaggggaggaggactgggtccttccctctgaagttgaagtattggagtccatctatctagatgaactacaggtgattaaaggaaatggcagaacttcaccatgggagatctacatcactttgcatcctgccactgcagaggaccaggattcacagtatgtctgcttcactctggtgcttcaggtcccagcagagtatccccatgaggtgccacagatctctatccgaaatccccgaggactttcagatgaacagatccacacgatcttacaggtgctgggccacgtggccaaggctgggctgggcactgccatgctgtatgaactcattgagaaagggaaggaaattctcacagataacaacatccctcatggccagtgtgtcatctgcctctatggtttccaggagaaggaggcctttaccaaaacaccctgttaccactacttccactgccactgccttgctcggtacatccagcacatggagcaagagctgaaggcacaaggacaggagcaggaacaggaacggcagcatgctacaaccaaacagaaggcagtcggtgtgcagtgtccagtgtgcagagagcccctcgtgtatgatcttgcctcactgaaagcagcccctgaaccccaacagcccatggagctgtaccagcccagtgcagagagcttgcgccagcaagaagaacgcaagcggctctaccagaggcagcaggagcgggggggaatcattgaccttgaggctgagcgaaaccgatacttcatcagccttcagcagcctcctgcccctgcggaacctgagtcagctgtagatgtctccaaaggatcccaaccacccagcacccttgcagcagaactatccacctcaccagccgtccaatccactttgccacctcctctgcctgtggcgacccagcacatatgtgagaagattccagggaccaggtcaaatcagcaaaggttgggcgaaacccagaaagctatgctagatccccccaagcccagtcgaggtccctggcgacagcccgaacggaggcacccaaagggaggggagtgccacgcccctaaaggtacccgtgacacccaggaactgccacctcctgaggggcccctcaaggagcccatggacctaaagccagaaccccatagccaaggagttgaaggtcctccacaagagaaggggcctggcagctggcaggggcccccaccccgcaggactcgggactgtgttcgctgggagcgctctaagggccggacacccggttcttcctaccctcgcctgcctcggggccagggagcataccggcctggtactcggagggagtccctgggcctggaatctaaggatggttcctagcaggacttggtggggggaacagggaattggggatgggagggaggcaataaagatatttggccttctttggctttctttgctt

SEQ ID NO: 86 - protein, 459 aa, Homo sapiens
MAASASAAAGEEDWVLPSEVEVLESIYLDELQVIKGNGRTSPWEIYITLHPATAEDQDSQYVCFTLVLQVPAEYPHEVPQISIRNPRGLSDEQIHTILQVLGHVAKAGLGTAMLYELIEKGKEILTDNNIPHGQCVICLYGFQEKEAFTKTPCYHYFHCHCLARYIQHMEQELKAQGQEQEQERQHATTKQKAVGVQCPVCREPLVYDLASLKAAPEPQQPMELYQPSAESLRQQEERKRLYQRQQERGGIIDLEAERNRYFISLQQPPAPAEPESAVDVSKGSQPPSTLAAELSTSPAVQSTLPPPLPVATQHICEKIPGTRSNQQRLGETQKAMLDPPKPSRGPWRQPERRHPKGGECHAPKGTRDTQELPPPEGPLKEPMDLKPEPHSQGVEGPPQEKGPGSWQGPPPRRTRDCVRWERSKGRTPGSSYPRLPRGQGAYRPGTRRESLGLESKDGS

SEQ ID NO: 87 - DNA, 1701 bp, Homo sapiens
  CDS (20)..(832)
agtgcggcgctgtttaaagatggcggcggaggaacctcagcagcagaagcaggagccgctgggcagcgactccgaaggtgttaactgtctggcctatgatgaagccatcatggctcagcaggaccgaattcagcaagagattgctgtgcagaaccctctggtgtcagagcggctggagctctcggtcctatacaaggagtatgctgaagatgacaacatctatcaacagaagatcaaggacctccacaaaaagtactcgtacatccgcaagaccaggcctgacggcaactgtttctatcgggctttcggattctcccacttggaggcactgctggatgacagcaaggagttgcagcggttcaaggctgtgtctgccaagagcaaggaagacctggtgtcccagggcttcactgaattcacaattgaggatttccacaacacgttcatggacctgattgagcaggtggagaagcagacctctgtcgccgacctgctggcctccttcaatgaccagagcacctccgactaccttgtggtctacctgcggctgctcacctcgggctacctgcagcgcgagagcaagttcttcgagcacttcatcgagggtggacggactgtcaaggagttctgccagcaggaggtggagcccatgtgcaaggagagcgaccacatccacatcattgcgctggcccaggccctcagcgtgtccatccaggtggagtacatggaccgcggcgagggcggcaccaccaatccgcacatcttccctgagggctccgagcccaaggtctaccttctctaccggcctggacactacgatatcctctacaaatagggctggctccagcccgctgctgccctgctgcccccctctgccaggcgctagacatgtacagaggtttttctgtggttgtaaatggtcctatttcacccccttcttcctgtcacatgacccccccccatgttttattaaagggggtgctggtggtgagccgtgtgtgcgtgtccctgctctgctgcccgcctggctgctctgtctgctgccccctccccccaggtgggtccccctgcttttcacctatctactcctgagcttccccaacaggagcaggtttgaggggccaggcctcttggaggcccctcctgcttcgttgggttctgcttccttcccttcttagctggctcaggggcttctatgggatcctggaagttccttagggacttgcccagggtcccagggccacccacacttcatctgctccctcataggccccacctccacgtcccggctgggccccagaccccagcttcctgccctccaccgggagtctgcatggttgggagtcctgggtggaggggcctttgtgaggctggacccggctcagggcaggtggaggagctgggcctcccacagggtgcccgggcagtgccatcctggtgggggagggcagccttcaaacgtgtggggtctacagtcctcaggtctaggcagggctgccggttctccacctccccatccgccccaggccccctgcctgtgcctgccttgcaccccctctgcttgggccacggtgtctctgcattgcctgcctttttgccttcacctcttttcttccccgccccctgcacattcggggtctcagcccccaggctgtgagctccttgggggcaggccctcaataaatgtgaactgctgctgcc

SEQ ID NO: 88 - protein, 271 aa, Homo sapiens
MAAEEPQQQKQEPLGSDSEGVNCLAYDEAIMAQQDRIQQEIAVQNPLVSERLELSVLYKEYAEDDNIYQQKIKDLHKKYSYIRKTRPDGNCFYRAFGFSHLEALLDDSKELQRFKAVSAKSKEDLVSQGFTEFTIEDFHNTFMDLIEQVEKQTSVADLLASFNDQSTSDYLVVYLRLLTSGYLQRESKFFEHFIEGGRTVKEFCQQEVEPMCKESDHIHIIALAQALSVSIQVEYMDRGEGGTTNPHIFPEGSEPKVYLLYRPGHYDILYK

SEQ ID NO: 89 - DNA, 992 bp, Homo sapiens
  CDS (22)..(834)
gtagtgcggcgctgtttaaagatggcggcggaggaacctcagcagcagaagcaggagccgctgggcagcgactccgaaggtgttaactgtctggcctatgatgaagccatcatggctcagcaggaccgaattcagcaagagattgctgtgcagaaccctctggtgtcagagcggctggagctctcggtcctatacaaggagtatgctgaagatgacaacatctatcaacagaagatcaaggacctccacaaaaagtactcgtacatccgcaagaccaggcctgacggcaactgtttctatcgggctttcggattctcccacttggaggcactgctggatgacagcaaggagttgcagcggttcaaggctgtgtctgccaagagcaaggaagacctggtgtcccagggcttcactgaattcacaattgaggatttccacaacacgttcatggacctgattgagcaggtggagaagcagacctctgtcgccgacctgctggcctccttcaatgaccagagcacctccgactaccttgtggtctacctgcggctgctcacctcgggctacctgcagcgcgagagcaagttcttcgagcacttcatcgagggtggacggactgtcaaggagttctgccagcaggaggtggagcccatgtgcaaggagagcgaccacatccacatcattgcgctggcccaggccctcagcgtatccatccaggtggagtacatggaccgcggcgagggcggcaccaccaatccgcacatcttccctgagggctccgagcccaaggtctaccttctctaccggcctggacactacgatatcctctacaaatagggctggctccagcccgctgctgccctgctgcccccctctgccaggcgctagacatgtacagaggtttttctgtggttgtaaatggtcctatttcacccccttcttcctgtcacatgacccccccccatgttttattaaagggggtgctggtggtg

SEQ ID NO: 90 - protein, 271 aa, Homo sapiens; identical to SEQ ID NO: 88

SEQ ID NO: 91 - DNA, 2485 bp, Homo sapiens
  CDS (162)..(896)
gcttcctgttccggcgccaggaggagccgcgcgctgctggtgctgttgccgccgctgctctagctgccgtcagtcaggctgcgcccgcgtcttcagggcccagtccctcggacccatcgccgcttctagaccctactgcggtctcggatattgccgggaaaatgtctgatgaattttcgttggcagatgcactacctgaacactcccctgccaaaacctctgctgtgagcaatacaaaacctggccaacctcctcaaggctggccaggctccaacccttggaataatccgagtgctccatcttcagtgccatctggactcccaccaagtgcaacaccctccactgtgccttttggaccagcaccaacaggaatgtatccctccgtgcctcccaccggaccacctccaggacccccagcaccctttcctccttccggaccatcatgtcccccacctggtggtccttatccagccccaactgtgccgggccctggccccacagggccatatcctacaccaaatatgccctttccagagctacccagaccatatggtgcacccacagatccagctgcagctggtcctttaggtccatggggatccatgtcttctggaccttgggcgccaggaatgggagggcagtatcctacccctaatatgccatatccatctccaggcccatatcccgctcctcctcctccccaagcccctggggcagcaccacctgttccatggggcaccgttccaccaggagcctggggaccaccagcaccatatcctgcccctacaggatcgtatcccacaccaggactctatcctactcccagtaatcctttccaagtgccttcaggaccttctggtgctccaccaatgcctggtggcccccattcttaccattaagttaacaatggacgaagagatgacgctttgctttttgaagtacatgtatatgcacatgaatgcatatataaaaattgctggtttcactattagagggcattcatgaaagaacaactcttgcacctctcagagaagataactgcctcttgtacttggatgcgtagtacatcatatgtatacaatcagataaaagcatagaagtaaatcattcggatgtgatttttatttggttttcatggaaagttaaagtgataaagtatattgaatagttctttgacagaatttgtttaaactatgaaactacacacttaaaaatctaagatgtggattattgttagaatctgcaacttcattggcaaattatttcaagtatttttctataatcactttccccttctaaataaataaacttcgagaataacccatcataatccaaacaaatgatgcctcaacattttgagctgctctgtcggacaaataaacctggtcctcttgaggttatattttggatatacatttttaaactgtcagtaattattgtcagatgtggagttcaatagccagccagtgttcatttttatccttgagcttttagtaaaaacttcctggttttatttttagtcattgggtcatacagcactaaagtctgctatttatggaaactaacttttttgtttttaatccaggccaacatgtatgtaaattaaatttttagataattgattatctctttgtactacttgagatttgattatgagatgtgcatattgctttgggaagagctcgaggaaggaaataattctctcctttgttttgaacctcaaactagataaaccctaggaattgcttaactgcaacaagtaattttcattcccacaaaaacctgaggcagctcttttgcccagagcgttccctgtagccacccccaccccacttgcccttggttctttagaaggagcacacacatcccttgattcctccctgatgtggtaaactggcacactccaggggtctaaaacataaaacagttgtgtttagggaaccttaagtcatgcagacatgactgttctctttgtacaagtgtgaatcaaaatatgtatctctttttcagagtctggttaagctatgtcattgtctactgcatagtttcctgagtctgtttgtaaagtgcttatggctaacagttcagttctgtatttgttgacaggtaaataagtggagttgagtgccatctttgaaaaaattaccctctagctctaacactgaaaataataataaattgtagatctctgcaactaagtttaaagcagtgtgactgtgttgcttaaatatcaagtattgtttataaccaccaaaaaaaaaaagccctggtagttttttggcaccttatgtttaaatcagattcttagatttggagtagacctgaccttgttatttattagataacattttgaatgtatccattggatttctaaaatgtattgtgaatttctcagacaaacaggatttatgctggagctctgttttgcttagaaataaaatatttagtagtttatttctgctctaattaaaatgtcaagaatgcc

SEQ ID NO: 92 - protein, 245 aa, Homo sapiens
MSDEFSLADALPEHSPAKTSAVSNTKPGQPPQGWPGSNPWNNPSAPSSVPSGLPPSATPSTVPFGPAPTGMYPSVPPTGPPPGPPAPFPPSGPSCPPPGGPYPAPTVPGPGPTGPYPTPNMPFPELPRPYGAPTDPAAAGPLGPWGSMSSGPWAPGMGGQYPTPNMPYPSPGPYPAPPPPQAPGAAPPVPWGTVPPGAWGPPAPYPAPTGSYPTPGLYPTPSNPFQVPSGPSGAPPMPGGPHSYH

SEQ ID NO: 93 - DNA, 1503 bp, Homo sapiens
  CDS (63)..(611)
cttttgcggctgcagcgggcttgtaggtgtccggctttgctggcccagcaagcctgataagcatgaagctcttatctttggtggctgtggtcgggtgtttgctggtgcccccagctgaagccaacaagagttctgaagatatccggtgcaaatgcatctgtccaccttatagaaacatcagtgggcacatttacaaccagaatgtatcccagaaggactgcaactgcctgcacgtggtggagcccatgccagtgcctggccatgacgtggaggcctactgcctgctgtgcgagtgcaggtacgaggagcgcagcaccaccaccatcaaggtcatcattgtcatctacctgtccgtggtgggtgccctgttgctctacatggccttcctgatgctggtggaccctctgatccgaaagccggatgcatatactgagcaactgcacaatgaggaggagaatgaggatgctcgctctatggcagcagctgctgcatccctcgggggaccccgagcaaacacagtcctggagcgtgtggaaggtgcccagcagcggtggaagctgcaggtgcaggagcagcggaagacagtcttcgatcggcacaagatgctcagctagatgggctggtgtggttgggtcaaggccccaacaccatggctgccagcttccaggctggacaaagcagggggctacttctcccttccctcggttccagtcttccctttaaaagcctgtggcatttttcctccttctccctaactttagaaatgttgtacttggctattttgattagggaagagggatgtggtctctgatctccgttgtcttcttgggtctttggggttgaagggagggggaaggcaggccagaagggaatggagacattcgaggcggcctcaggagtggatgcgatctgtctctcctggctccactcttgccgccttccagctctgagtcttgggaatgttgttacccttggaagataaagctgggtcttcaggaactcagtgtctgggaggaaagcatggcccagcattcagcatgtgttcctttctgcagtggttctttatcaccacctccctcccagccccagcgcctcagccccagccccagctccagccctgaggacagctctgatgggagagctgggccccctgagcccactgggtcttcagggtgcactggaagctggtgttcgctgtcccctgtgcacttctcgcactggggcatggagtgcccatgcatactctgctgccggtcccctcacctgcacttgaggggtctgggcagtccctcctctccccagtgtccacagtcactgagccagacggtcggttggaacatgagactcgaggctgagcgtggatctgaacaccacagcccctgtacttgggttgcctcttgtccctgaacttcgttgtaccagtgcatggagagaaaattttgtcctcttgtcttagagttgtgtgtaaatcaaggaagccatcattaaattgttttatttctc

SEQ ID NO: 94 - protein, 183 aa, Homo sapiens
MKLLSLVAVVGCLLVPPAEANKSSEDIRCKCICPPYRNISGHIYNQNVSQKDCNCLHVVEPMPVPGHDVEAYCLLCECRYEERSTTTIKVIIVIYLSVVGALLLYMAFLMLVDPLIRKPDAYTEQLHNEEENEDARSMAAAAASLGGPRANTVLERVEGAQQRWKLQVQEQRKTVFDRHKMLS

SEQ ID NO: 95 - DNA, 1519 bp, Homo sapiens
  CDS (79)..(420)
gcggggacaactgggtcttttgcggctgcagcgggcttgtaggtgtccggctttgctggcccagcaagcctgataagcatgaagctcttatctttggtggctgtggtcgggtgtttgctggtgcccccagctgaagccaacaagagttctgaagatatccggtgcaaatgcatctgtccaccttatagaaacatcagtgggcacatttacaaccagaatgtatcccagaaggactgcaactgcctgcacgtggtggagcccatgccagtgcctggccatgacgtggaggcctactgcctgctgtgcgagtgcaggtacgaggagcgcagcaccaccaccatcaaggtcatcattgtcatctacctgtccgtggtgggtgccctgttgctctacatggccttcctgatgcggtggaccctctgatccgaaagccggatgcatacactgagcaactgcacaatgaggaggagaatgaggatgctcgctctatggcagcagctgctgcatccctcgggggaccccgagcaaacacagtcctggagcgtgtggaaggtgcccagcagcggtggaagctgcaggtgcaggagcagcggaagacagtcttcgatcggcacaagatgctcagctagatgggctggtgtggttgggtcaaggccccaacaccatggctgccagcttccaggctggacaaagcagggggctacttctcccttccctcggttccagtcttccctttaaaagcctgtggcatttttcctccttctccctaactttagaaatgttgtacttggctattttgattagggaagagggatgtggtctctgatctctgttgtcttcttgggtctttggggttgaagggatggggaaggcaggccagaagggaatggagacattcgaggcggcctcaggagtggatgcgatctgtctctcctggctccactcttgccgccttccagctctgagtcttgggaatgttgttacccttggaagataaagctgggtcttcaggaactcagtgtctgggaggaaagcatggcccagcattcagcatgtgttcctttctgcagtggttcttatcaccacctccctcccagccccagcgcctcagccccagccccagctccagccctgaggacagctctgatgggagagctgggccccctgagcccactgggtcttcagggtgcactggaagctggtgttcgctgtcccctgtgcacttctcgcactggggcatggagtgcccatgcatactctgctgccggtcccctcacctgcacttgaggggtctgggcagtccctcctctccccagtgtccacagtcactgagccagacggtcggttggaacatgagactcgaggctgagcgtggatctgaacaccacagcccctgtacttgggttgcctcttgtccctgaacttcgttgtaccagtgcatggagagaaaattttgtcctcttgtcttagagttgtgtgtaaatcaaggaagccatcattaaattgttttatttctctc

SEQ ID NO: 96 - protein, 114 aa, Homo sapiens
MKLLSLVAVVGCLLVPPAEANKSSEDIRCKCICPPYRNISGHIYNQNVSQKDCNCLHVVEPMPVPGHDVEAYCLLCECRYEERSTTTIKVIIVIYLSVVGALLLYMAFLMRWTL

SEQ ID NO: 97 - DNA, 2680 bp, Homo sapiens
  CDS (99)..(2000)
taaaatctgaaagtacaaaccatgagcaacaatctcctcagagtggaaaagttattcctgatcgttccaccaagccagtagttttttctccaactctcatgttaacagatgaagaaaaggctcgtattcatgcagaaactgctcttctaatggaaaaaaacaaacaagaaaaagaacttcgggaaaggcagcaagaggaacagaaagagaaactgaggaaggaagaacaagaacaaaaagccaaaaagaaacaagaagctgaagaaaatgaaattacagagaagcaacaaaaagcaaaagaagaaatggagaagaaagaaagtgaacaggccaagaaagaagataaagaaacctcagcaaagaggggcaaagaaataacaggagtaaaaagacaaagtaaaagtgaacatgaaacttctgatgccaagaaatctgtagaagatagggggaaaaggtgtccaaccccagaaatacagaaaaagtcaacaggagatgtgccccatacatctgtgacaggggattcaggttcaggcaaggctcaacgagaacctttgacaagagcacgaagtgaagaaatggggaggatcgtaccaggactgccttcaggctgggccaagtttcttgacccaatcactggaacctttcgttattatcattcacccaccaacactgttcatatgtacccaccggaaatggctccttcatctgcacctccttccacccctccaactcataaagccaagccacagattcctgctgagcgggatagggaaccttccaaactgaagcgctcctactcctccccagatataacccaggctattcaagaggaagagaagaggaagccaacagtaactccagcagttaatcgggaaaacaagccaacatgttatcctaaagctgagatctcaaggctttctgcttctcagattcggaacctcaatcctgtttttggaggttctggaccagctcttactggacttcgtaacttaggaaatacttgttatatgaactcaatattgcagtgcctatgtaacgctccacatttggctgattatttcaaccgaaactgttatcaggatgatattaacaggtcaaatttgttggggcataaaggtgaagtggcagaagaatttggtataatcatgaaagccctgtggacaggacagtatagatatatcagtccaaaggactttaaaatcaccattgggaagatcaatgaccagtttgcaggatacagtcagcaagattcacaagaattgcttctgttcctaatggatggtctccatgaagatctaaataaagctgataatcggaagagatataaagaagaaaataatgatcatctcgatgactttaaagctgcagaacatgcctggcagaaacacaagcagctcaatgagtctattattgttgcactttttcagggtcaattcaaatctacagtacagtgcctcacatgtcacaaaaagtctaggacatttgaggccttcatgtatttgtctctaccactagcatccacaagtaaatgtacattacaggattgccttagattattttccaaagaagaaaaactcacagataacaacagattttactgcagtcattgcagagctcgacgggattctctaaaaaagatagaaatctggaagttaccacctgtgcttttagtgcatctgaaacgtttttcctacgatggcaggtggaaacaaaaattacagacatctgtggacttcccgttagaaaatcttgacttgtcacagtatgttattggtccaaagaacaatttgaagaaatataatttgttttctgtttcaaatcactacggtgggctggatggaggccactacacagcctattgtaaaaatgcagcaagacaacggtggtttaagtttgatgatcatgaagtttctgatatctccgtttcttctgtgaaatcttcagcagcttatatcctcttttatacttcattgggaccacgagtaactgatgtagccacataaggagacataggttataaactagttatcttttaaaaggctcagcaacacaactcttgaaatgcttatcaggataatggtagctatagctggccatttagaggaattctaggacagtgggagctgtgttactagcactatataattccggtcagtgctgacaaataacatttaacaagtattgcagtaatcatcacttacaggtaccatttatttcaaaacaacttttttagtctgctccaaagttaaaataattaactagctaagcattattattcgactggtctaaaaactattgttatctttttttttccttttcactgttatggccttttcacatttctaaatcccatcttgatatactatgaatactctagaatgatgtaaagcagataggaatgtatgtgtacatatttattgcatacttgcacatcaaatcgatgtacatagtttaacacgtggtccttttgtgaaacctagaactcagaggattgctttttttctttcagcctattttgagtaacttcagtgctttcttagggaaatgacagggcaaagcaatttttctgttggctttgggctgtatttgtgcactaaatctttattctaaaaaaaaaatggaaactttaatttttttaaaacgagaatttcatttacagctacattaaaatcttaatgag

SEQ ID NO: 98 - protein, 634 aa, Homo sapiens
MLTDEEKARIHAETALLMEKNKQEKELRERQQEEQKEKLRKEEQEQKAKKKQEAEENEITEKQQKAKEEMEKKESEQAKKEDKETSAKRGKEITGVKRQSKSEHETSDAKKSVEDRGKRCPTPEIQKKSTGDVPHTSVTGDSGSGKAQREPLTRARSEEMGRIVPGLPSGWAKFLDPITGTFRYYHSPTNTVHMYPPEMAPSSAPPSTPPTHKAKPQIPAERDREPSKLKRSYSSPDITQAIQEEEKRKPTVTPAVNRENKPTCYPKAEISRLSASQIRNLNPVFGGSGPALTGLRNLGNTCYMNSILQCLCNAPHLADYFNRNCYQDDINRSNLLGHKGEVAEEFGIIMKALWTGQYRYISPKDFKITIGKINDQFAGYSQQDSQELLLFLMDGLHEDLNKADNRKRYKEENNDHLDDFKAAEHAWQKHKQLNESIIVALFQGQFKSTVQCLTCHKKSRTFEAFMYLSLPLASTSKCTLQDCLRLFSKEEKLTDNNRFYCSHCRARRDSLKKIEIWKLPPVLLVHLKRFSYDGRWKQKLQTSVDFPLENLDLSQYVIGPKNNLKKYNLFSVSNHYGGLDGGHYTAYCKNAARQRWFKFDDHEVSDISVSSVKSSAAYILFYTSLGPRVTDVAT

SEQ ID NO: 99 - DNA, 2680 bp, Homo sapiens
  CDS (99)..(2000)
taaaatctgaaagtacaaaccatgagcaacaatctcctcagagtggaaaagttattcctgatcgttccaccaagccagtagttttttctccaactctcatgttaacagatgaagaaaaggctcgtattcatgcagaaactgctcttctaatggaaaaaaacaaacaagaaaaagaacttcgggaaaggcagcaagaggaacagaaagagaaactgaggaaggaagaacaagaacaaaaagccaaaaagaaacaagaagctgaagaaaatgaaattacagagaagcaacaaaaagcaaaagaagaaatggagaagaaagaaagtgaacaggccaagaaagaagataaagaaacctcagcaaagaggggcaaagaaataacaggagtaaaaagacaaagtaaaagtgaacatgaaacttctgatgccaagaaatctgtagaagatagggggaaaaggtgtccaaccccagaaatacagaaaaagtcaacaggagatgtgccccatacatctgtgacaggggattcaggttcaggcaaggctcaacgagaacctttgacaagagcacgaagtgaagaaatggggaggatcgtaccaggactgccttcaggctgggccaagtttcttgacccaatcactggaacctttcgttattatcattcacccaccaacactgttcatatgtacccaccggaaatggctccttcatctgcacctccttccacccctccaactcataaagccaagccacagattcctgctgagcgggatagggaaccttccaaactgaagcgctcctactcctccccagatataacccaggctattcaagaggaagagaagaggaagccaacagtaactccaacagttaatcgggaaaacaagccaacatgttatcctaaagctgagatctcaaggctttctgcttctcagattcggaacctcaatcctgtttttggaggttctggaccagctcttactggacttcgtaacttaggaaatacttgttatatgaactcaatattgcagtgcctatgtaacgctccacatttggctgattatttcaaccgaaactgttatcaggatgatattaacaggtcaaatttgttggggcataaaggtgaagtggcagaagaatttggtataatcatgaaagccctgtggacaggacagtatagatatatcagtccaaaggactttaaaatcaccattgggaagatcaatgaccagtttgcaggatacagtcagcaagattcacaagaattgcttctgttcctaatggatggtctccatgaagatctaaataaagctgataatcggaagagatataaagaagaaaataatgatcatctcgatgactttaaagctgcagaacatgcctggcagaaacacaagcagctcaatgagtctattattgttgcactttttcagggtcaattcaaatctacagtacagtgcctcacatgtcacaaaaagtctaggacatttgaggccttcatgtatttgtctctaccactagcatccacaagtaaatgtacattacaggattgccttagattattttccaaagaagaaaaactcacagataacaacagattttactgcagtcattgcagagctcgacgggattctctaaaaaagatagaaatctggaagttaccacctgtgcttttagtgcatctgaaacgtttttcctacgatggcaggtggaaacaaaaattacagacatctgtggacttcccgttagaaaatcttgacttgtcacagtatgttattggtccaaagaacaatttgaagaaatataatttgttttctgtttcaaatcactacggtgggctggatggaggccactacacagcctattgtaaaaatgcagcaagacaacggtggtttaagtttgatgatcatgaagtttctgatatctccgtttcttctgtgaaatcttcagcagcttatatcctcttttatacttcattgggaccacgagtaactgatgtagccacataaggagacataggttataaactagttatcttttaaaaggctcagcaacacaactcttgaaatgcttatcaggataatggtagctatagctggccatttagaggaattctaggacagtgggagctgtgttactagcactatataattccggtcagtgctgacaaataacatttaacaagtattgcagtaatcatcacttacaggtaccatttatttcaaaacaacttttttagtctgctccaaagttaaaataattaactagctaagcattattattcgactggtctaaaaactattgttatctttttttttccttttcactgttatggccttttcacatttctaaatcccatcttgatatactatgaatactctagaatgatgtaaagcagataggaatgtatgtgtacatatttattgcatacttgcacatcaaatcgatgtacatagtttaacacgtggtccttttgtgaaacctagaactcagaggattgctttttttctttcagcctattttgagtaacttcagtgctttcttagggaaatgacagggcaaagcaatttttctgttggctttgggctgtatttgtgcactaaatctttattctaaaaaaaaaatggaaactttaatttttttaaaacgagaatttcatttacagctacattaaaatcttaatgag

SEQ ID NO: 100 - protein, 634 aa, Homo sapiens
MLTDEEKARIHAETALLMEKNKQEKELRERQQEEQKEKLRKEEQEQKAKKKQEAEENEITEKQQKAKEEMEKKESEQAKKEDKETSAKRGKEITGVKRQSKSEHETSDAKKSVEDRGKRCPTPEIQKKSTGDVPHTSVTGDSGSGKAQREPLTRARSEEMGRIVPGLPSGWAKFLDPITGTFRYYHSPTNTVHMYPPEMAPSSAPPSTPPTHKAKPQIPAERDREPSKLKRSYSSPDITQAIQEEEKRKPTVTPTVNRENKPTCYPKAEISRLSASQIRNLNPVFGGSGPALTGLRNLGNTCYMNSILQCLCNAPHLADYFNRNCYQDDINRSNLLGHKGEVAEEFGIIMKALWTGQYRYISPKDFKITIGKINDQFAGYSQQDSQELLLFLMDGLHEDLNKADNRKRYKEENNDHLDDFKAAEHAWQKHKQLNESIIVALFQGQFKSTVQCLTCHKKSRTFEAFMYLSLPLASTSKCTLQDCLRLFSKEEKLTDNNRFYCSHCRARRDSLKKIEIWKLPPVLLVHLKRFSYDGRWKQKLQTSVDFPLENLDLSQYVIGPKNNLKKYNLFSVSNHYGGLDGGHYTAYCKNAARQRWFKFDDHEVSDISVSSVKSSAAYILFYTSLGPRVTDVAT

SEQ ID NO: 101 - DNA, 2037 bp, Homo sapiens
  CDS (26)..(1348)
tcattcacccaccaacactgttcatatgtacccaccggaaatggctccttcatctgcacctccttccacccctccaactcataaagccaagccacagattcctgctgagcgggatagggaaccttccaaactgaagcgctcctactcctccccagatataacccaggctattcaagaggaagagaagaggaagccaacagtaactccaacagttaatcgggaaaacaagccaacatgttatcctaaagctgagatctcaaggctttctgcttctcagattcggaacctcaatcctgtttttggaggttctggaccagctcttactggacttcgtaacttaggaaatacttgttatatgaactcaatattgcagtgcctatgtaacgctccacatttggctgattatttcaaccgaaactgttatcaggatgatattaacaggtcaaatttgttggggcataaaggtgaagtggcagaagaatttggtataatcatgaaagccctgtggacaggacagtatagatatatcagtccaaaggactttaaaatcaccattgggaagatcaatgaccagtttgcaggatacagtcagcaagattcacaagaattgcttctgttcctaatggatggtctccatgaagatctaaataaagctgataatcggaagagatataaagaagaaaataatgatcatctcgatgactttaaagctgcagaacatgcctggcagaaacacaagcagctcaatgagtctattattgttgcactttttcagggtcaattcaaatctacagtacagtgcctcacatgtcacaaaaagtctaggacatttgaggccttcatgtatttgtctctaccactagcatccacaagtaaatgtacattacaggattgccttagattattttccaaagaagaaaaactcacagataacaacagattttactgcagtcattgcagagctcgacgggattctctaaaaaagatagaaatctggaagttaccacctgtgcttttagtgcatctgaaacgtttttcctacgatggcaggtggaaacaaaaattacagacatctgtggacttcccgttagaaaatcttgacttgtcacagtatgttattggtccaaagaacaatttgaagaaatataatttgttttctgtttcaaatcactacggtgggctggatggaggccactacacagcctattgtaaaaatgcagcaagacaacggtggtttaagtttgatgatcatgaagtttctgatatctccgtttcttctgtgaaatcttcagcagcttatatcctcttttatacttcattgggaccacgagtaactgatgtagccacataaggagacataggttataaactagttatcttttaaaaggctcagcaacacaactcttgaaatgcttatcaggataatggtagctatagctggccatttagaggaattctaggacagtgggagctgtgttactagcactatataattccggtcagtgctgacaaataacatttaacaagtattgcagtaatcatcacttacaggtaccatttatttcaaaacaacttttttagtctgctccaaagttaaaataattaactagctaagcattattattcgactggtctaaaaactattgttatcttttttttttccttttcactgttatggccttttcacatttctaaatcccatcttgatatactatgaatactctagaatgatgtaaagcagataggaatgtatgtgtacatatttattgcatacttgcacatcaaatcgatgtacatagtttaacacgtggtccttttgtgaaacctagaactcagaggattgctttttttctttcagcctattttgagttaacttcagtgctttcttagggaaatgacagggcaaagcaatttttctgttggctttgggctgtatttgtgcactaaatctttattctaaaaaaaaaaatggaaactttaatttttttaaaacgagaatttcatttacagctacattaaaatcttaatgagaaaaat

SEQ ID NO: 102 - protein, 441 aa, Homo sapiens [sequence omitted]

SEQ ID NO: 103 - DNA, 4359 bp, Homo sapiens
  CDS (318)..(3671)
gtgagctgggctggcttccgtcctggtagccaaggctaattctccctcgagttcttgggagatgggcatttggcgagaaggctggcgttagtgaagcgcgcccggcgtcacggtgagtgcgggtcttgggccctagcacctgttctctgggaagtcgtccgctgtgaacgatgaacgcctttccttccaccagctgctggttaccccggagacaagctctgtccgcggagaggagtgggacaactcctaaaggaaagaagcacttgtaaggaaatatagcatccattgtgaaagtggaaaagtaaagataattcatcatgcctgctgtggcttcagttcctaaagaactctacctcagttcttcactaaaagaccttaataagaagacagaagttaaaccagagaaaataagcactaagagttatgtgcacagtgccctgaagatctttaagacagcagaagaatgcagattagatcgtgatgaggaaagggcctatgtactatatatgaaatacgtgactgtttataatcttatcaaaaaaagacctgatttcaagcaacagcaggattatttccattcaatacttggacctggaaacatcaaaaaagctgtcgaagaagctgaaagactctctgaaagccttaaattaagatatgaagaagctgaagtccggaaaaaacttgaggaaaaagacaggcaggaggaagcacagcggctacaacaaaaaaggcaggaaacaggaagagaggatggtggcacattggctaaaggctctttggagaatgttttggattccaaagacaaaacccaaaagagcaatggtgaaaagaatgaaaaatgtgagaccaaagagaaaggagcaatcacagcaaaggaactatacacaatgatgacggataaaaacatcagcttgattataatggatgctcgaagaatgcaggattatcaggattcctgtattttacattctctcagtgttcctgaagaagccatcagtccaggagtcactgctagttggattgaagcacacctgccagatgattctaaagacacatggaagaagagggggaatgtggagtatgtggtacttcttgactggtttagttctgccaaagatttacagattggaacaactctccggagtctgaaagatgcacttttcaagtgggaaagtaaaactgtcctgcgcaatgagcctttggttttagagggaggctatgaaaactggctcctttgttatccccagtatacaacaaatgctaaggtcactccacccccacgacgccagaatgaagaggtgtctatctcattggattttacttatccctcattggaagaatcaattccttctaaacctgctgcccagacgccacctgcatctatagaagtagatgaaaatatagaattgataagtggtcaaaatgagagaatgggaccactgaatatatcaactccagttgaaccagttgctgcttctaaatctgatgtttcacccataattcagccagtgcctagtataaagaatgttccacagattgatcgtactaaaaaaccagcagtcaaattgcctgaagagcatagaataaaatctgaaagtacaaaccatgagcaacaatctcctcagagtggaaaagttattcctgatcgttccaccaagccagtagttttttctccaactctcatgttaacagatgaagaaaaggctcgtattcatgcagaaactgctcttctaatggaaaaaaacaaacaagaaaaagaacttcgggaaaggcagcaagaggaacagaaagagaaactgaggaaggaagaacaagaacaaaaagccaaaaagaaacaagaagctgaagaaaatgaaattacagagaagcaacaaaaagcaaaagaagaaatggagaagaaagaaagtgaacaggccaagaaagaagataaagaaacctcagcaaagaggggcaaagaaataacaggagtaaaaagacaaagtaaaagtgaacatgaaacttctgatgccaagaaatctgtagaagatagggggaaaaggtgtccaaccccagaaatacagaaaaagtcaacaggagatgtgccccatacatctgtgacaggggattcaggttcaggcaagccatttaagattaaaggacaaccagaaagtggaattctaaggacaggaacttttagagaggatacagacgataccgaaagaaataaagctcaacgagaacctttgacaagagcacgaagtgaagaaatggggaggatcgtaccaggactgccttcaggctgggccaagtttcttgacccaatcactggaacctttcgttattatcattcacccaccaacactgttcatatgtacccaccggaaatggctccttcatctgcacctccttccacccctccaactcataaagccaagccacagattcctgctgagcgggatagggaaccttccaaactgaagcgctcctactcctccccagatataacccaggctattcaagaggaagagaagaggaagccaacagtaactccaacagttaatcgggaaaacaagccaacatgttatcctaaagctgagatctcaaggctttctgcttctcagattcggaacctcaatcctgtttttggaggttctggaccagctcttactggacttcgtaacttaggaaatacttgttatatgaactcaatattgcagtgcctatgtaacgctccacatttggctgattatttcaaccgaaactgttatcaggatgatattaacaggtcaaatttgttggggcataaaggtgaagtggcagaagaatttggtataatcatgaaagccctgtggacaggacagtatagatatatcagtccaaaggactttaaaatcaccattgggaagatcaatgaccagtttgcaggatacagtcagcaagattcacaagaattgcttctgttcctaatggatggtctccatgaagatctaaataaagctgataatcggaagagatataaagaagaaaataatgatcatctcgatgactttaaagctgcagaacatgcctggcagaaacacaagcagctcaatgagtctattattgttgcactttttcagggtcaattcaaatctacagtacagtgcctcacatgtcacaaaaagtctaggacatttgaggccttcatgtatttgtctctaccactagcatccacaagtaaatgtacattacaggattgccttagattattttccaaagaagaaaaactcacagataacaacagattttactgcagtcattgcagagctcgacgggattctctaaaaaagatagaaatctggaagttaccacctgtgcttttagtgcatctgaaacgtttttcctacgatggcaggtggaaacaaaaattacagacatctgtggacttcccgttagaaaatcttgacttgtcacagtatgttattggtccaaagaacaatttgaagaaatataatttgttttctgtttcaaatcactacggtgggctggatggaggccactacacagcctattgtaaaaatgcagcaagacaacggtggtttaagtttgatgatcatgaagtttctgatatctccgtttcttctgtgaaatcttcagcagcttatatcctcttttatacttcattgggaccacgagtaactgatgtagccacataaggagacataggttataaactagttatcttttaaaaggctcagcaacacaactcttgaaatgcttatcaggataatggtagctatagctggccatttagaggaattctaggacagtgggagctgtgttactagcactatataattccggtcagtgctgacaaataacatttaacaagtattgcagtaatcatcacttacaggtaccatttatttcaaaacaacttttttagtctgctccaaagttaaaataattaactagctaagcattattattcaactggtctaaaaactattgttatctttttttttccttttcactgttatggccttttcacatttctaaatcccatcttgatatactatgaatactctagaatgatgtaaagcagataggaatgtatgtgtacatatttattgcatacttgcacatcaaatcgatgtacatagtttaacacgtggtccttttgtgaaacctagaactcagaggattgctttttttctttcagcctattttgagttaacttcagtcctttcttagggaaatgacagggcaaagcaatttttctgttggctttgggctgtatttgtgcactaaatctttattctaaaaaaaaaaatggaaactttaatttttttaaaacgggaatttcatttacagctacattaaaatcttaatgagaaaaat

SEQ ID NO: 104 - protein, 1118 aa, Homo sapiens
MPAVASVPKELYLSSSLKDLNKKTEVKPEKISTKSYVHSALKIFKTAEECRLDRDEERAYVLYMKYVTVYNLIKKRPDFKQQQDYFHSILGPGNIKKAVEEAERLSESLKLRYEEAEVRKKLEEKDRQEEAQRLQQKRQETGREDGGTLAKGSLENVLDSKDKTQKSNGEKNEKCETKEKGAITAKELYTMMTDKNISLIIMDARRMQDYQDSCILHSLSVPEEAISPGVTASWIEAHLPDDSKDTWKKRGNVEYVVLLDWFSSAKDLQIGTTLRSLKDALFKWESKTVLRNEPLVLEGGYENWLLCYPQYTTNAKVTPPPRRQNEEVSISLDFTYPSLEESIPSKPAAQTPPASIEVDENIELISGQNERMGPLNISTPVEPVAASKSDVSPIIQPVPSIKNVPQIDRTKKPAVKLPEEHRIKSESTNHEQQSPQSGKVIPDRSTKPVVFSPTLMLTDEEKARIHAETALLMEKNKQEKELRERQQEEQKEKLRKEEQEQKAKKKQEAEENEITEKQQKAKEEMEKKESEQAKKEDKETSAKRGKEITGVKRQSKSEHETSDAKKSVEDRGKRCPTPEIQKKSTGDVPHTSVTGDSGSGKPFKIKGQPESGILRTGTFREDTDDTERNKAQREPLTRARSEEMGRIVPGLPSGWAKFLDPITGTFRYYHSPTNTVHMYPPEMAPSSAPPSTPPTHKAKPQIPAERDREPSKLKRSYSSPDITQAIQEEEKRKPTVTPTVNRENKPTCYPKAEISRLSASQIRNLNPVFGGSGPALTGLRNLGNTCYMNSILQCLCNAPHLADYFNRNCYQDDINRSNLLGHKGEVAEEFGIIMKALWTGQYRYISPKDFKITIGKINDQFAGYSQQDSQELLLFLMDGLHEDLNKADNRKRYKEENNDHLDDFKAAEHAWQKHKQLNESIIVALFQGQFKSTVQCLTCHKKSRTFEAFMYLSLPLASTSKCTLQDCLRLFSKEEKLTDNNRFYCSHCRARRDSLKKIEIWKLPPVLLVHLKRFSYDGRWKQKLQTSVDFPLENLDLSQYVIGPKNNLKKYNLFSVSNHYGGLDGGHYTAYCKNAARQRWFKFDDHEVSDISVSSVKSSAAYILFYTSLGPRVTDVAT

SEQ ID NO: 105 - DNA, 1981 bp, Homo sapiens
  CDS (151)..(654)
aggggcggagtttccggcggcagcgccactcgggcgtcgggtgacgctaggcggacggaccatcatgtgacacggaagtagctccgaacaggaagaggacgaaaaaaataaccgtccgcgacgccgagacaaaccggacccgcaaccaccatgaacagcaaaggtcaatatccaacacagccaacctaccctgtgcagcctcctgggaatccagtataccctcagaccttgcatcttcctcaggctccaccctataccgatgctccacctgcctactcagagctctatcgtccgagctttgtgcacccaggggctgccacagtccccaccatgtcagccgcatttcctggagcctctctgtatcttcccatggcccagtctgtggctgttgggcctttaggttccacaatccccatggcttattatccagtcggtcccatctatccacctggctccacagtgctggtggaaggagggtatgatgcaggtgccagatttggagctggggctactgctggcaacattcctcctccacctcctggatgccctcccaatgctgctcagcttgcagtcatgcagggagccaacgtcctcgtaactcagcggaaggggaacttcttcatgggtggttcagatggtggctacaccatctggtgaggaaccaaggccacctttgtgccgggaaagacatcacataccttcagcacttctcacaatgtaactgctttagtcatattaacctgaagttgcagtttagacacatgttgttggggtgtctttctggtgcccaaactttcaggcacttttcaaatttaataaggaaccatgtaatggtagcagtacctccctaaagcattttgaggtaggggaggtatccattcataaaatgaatgtgggtgaagccgccctaaggattttcctttaatttctctggagtaatactgtaccatactggtctttgcttttagtaataaaacatcaaattaggtttggagggaactttgatcttcctaagaattaaagttgccaaattattctgattggtctttaatctcctttaagtctttgatatatattacttgttataaatggaacgcattagttgtctgccttttcctttccatcccttgccccacccatcccatctccaaccctagtcttccatttcctcccgccagtctccattgaatcaatggtgcaggacagaaagccagtcagactaatttccttctttcctcgcacttctccccactcgtcatcttttaactagtgtttcacaaggatcctctgaaaccctctctgtgccccaagtacagatcccattacttctgctttcgtatctcctcaggcaaaagtggagggtgccttatgggccctcctcataggttgtctctgcatacacgaacctaacccaaacttgctttggtgccagaaaaactgagctatgtttgaacaaagatgtcgtgcaaactgtactgtgaacaacagttggtttaaaatatgaggggcaaggaggaggatgcatttcaaaagcttgattgatgtgttcagagctaaattaagaggagttttcagatcaaaaactggttaccattttttgtcagagtgtctgatgcggccactcattcggctccccagaattcctagactgggttaatagggtcatattgtgaatgtctcactacaaaatgacttgagtccagtgaaatctcattagggtttaagaatatttcagggatccttaatgttttgatttttgttttctgaaattggattttattttattttatcttataatttcagttcatctaaattgtgtgttctgtacatgtgatgtttgactgtaccattgactgttatggaagttcagcgttgtatgtctctctctacactgtggtgcacttaacttgtggaatttttatactaaaaatgtagaataaagactattttgaagatttgaataaagtgatgaagttgcatt

SEQ ID NO: 106 - protein, 168 aa, Homo sapiens
MNSKGQYPTQPTYPVQPPGNPVYPQTLHLPQAPPYTDAPPAYSELYRPSFVHPGAATVPTMSAAFPGASLYLPMAQSVAVGPLGSTIPMAYYPVGPIYPPGSTVLVEGGYDAGARFGAGATAGNIPPPPPGCPPNAAQLAVMQGANVLVTQRKGNFFMGGSDGGYTIW

SEQ ID NO: 107 - DNA, 2324 bp, Homo sapiens
  CDS (672)..(995)
gacacggaagtagctccgaacaggaagaggacgaaaaaaataaccgtccgcgacgccgagacaaaccggacccgcaaccaccatgaacagcaaaggtcaatatccaacacagccaacctaccctgtgcagcctcctgggaatccagtataccctcagaccttgcatcttcctcaggctccaccctataccgatgctccacctgcctactcagaggtgcttccagtttgccagatttgaactagctgggaatactcttagggtggtcctttagtccttagctaaatctgacttcacatatttactcttcacaaatgctaacatgaataatctaaaacactatataatttggcaatttttgtcggagttgaaagtgcattatttgatgattttgtgttatttggcacaggctaaggtgcagaagatgaatttgcgttctgtgagcccaacattagctatagcagaaagtgatccaggagaatattgaaggccagtggaaaggcaacttgtataatcttacaaaaagtataacctgcataaggagaattaagaattagctcattaaagagatctcaaataggaatgtcataaagtaacattttgccttctcttctgcctcttctagctctatcgtccgagctttgtgcacccaggggctgccacagtccccaccatgtcagccgcatttcctggagcctctctgtatcttcccatggcccagtctgtggctgttgggcctttaggttccacaatccccatggcttattatccagtcggtcccatctatccacctggctccacagtgctggtggaaggagggtatgatgcaggtgccagatttggagctggggctactgctggcaacattcctcctccacctcctggatgccctcccaatgctgctcagcttgcagtcatgcagggagccaacgtcctcgtaactcagcggaaggggaacttcttcatgggtggttcagatggtggctacaccatctggtgaggaaccaaggccacctttgtgccgggaaagacatcacataccttcagcacttctcacaatgtaactgctttagtcatattaacctgaagttgcagtttagacacatgttgttggggtgtctttctggtgcccaaactttcaggcacttttcaaatttaataaggaaccatgtaatggtagcagtacctccctaaagcattttgaggtaggggaggtatccattcataaaatgaatgtgggtgaagccgccctaaggattttcctttaatttctctggagtaatactgtaccatactggtctttgcttttagtaataaaacatcaaattaggtttggagggaactttgatcttcctaagaattaaagttgccaaattattctgattggtctttaatctcctttaagtctttgatatatattacttgttataaatggaacgcattagttgtctgccttttcctttccatcccttgccccacccatcccatctccaaccctagtcttccatttcctcccgccagtctccattgaatcaatggtgcaggacagaaagccagtcagactaatttccttctttcctcgcacttctccccactcgtcatcttttaactagtgtttcacaaggatcctctgaaaccctctctgtgccccaagtacagatcccattacttctgctttcgtatctcctcaggcaaaagtggagggtgccttatgggccctcctcataggttgtctctgcatacacgaacctaacccaaatttgctttggtgccagaaaaactgagctatgtttgaacaaagatgtcgtgcaaactgtactgtgaacaacagttggtttaaaatatgaggggcaaggaggaggatgcatttcaaaagcttgattgatgtgttcagagctaaattaagaggagttttcagatcaaaaactggttaccattttttgtcagagtgtctgatgcggccactcattcggctccccagaattcctagactgggttaatagggtcatattgtgaatgtctcactacaaaatgacttgagtccagtgaaatctcattagggtttaagaatatttcagggatccttaatgttttgatttttgttttctgaaattggattttattttattttatcttataatttcagttcatctaaattgtgtgttctgtacatgtgatgtttgactgtaccattgactgttatggaagttcagcgttgtatgtctctctctacactgtggtgcacttaacttgtggaatttttatactaaaaatgtagaataaagactattttgaagatttgaataaagtgatgaagttgcattac

SEQ ID NO: 108 - protein, 108 aa, Homo sapiens
MSAAFPGASLYLPMAQSVAVGPLGSTIPMAYYPVGPIYPPGSTVLVEGGYDAGARFGAGATAGNIPPPPPGCPPNAAQLAVMQGANVLVTQRKGNFFMGGSDGGYTIW

SEQ ID NO: 109 - DNA, 2324 bp, Homo sapiens
  CDS (76)..(1131)
cattttggatggtgaaccctgaagtcggtgtctgctgcgttcacggcaggattcggttaggaggaacagcacagcatgctgggctctggatttaaagctgagcgcttaagagtgaatttgagattagtcataaatcgccttaaactattggagaaaaagaaaacggaactggcccagaaagcaaggaaggagattgctgactatctggctgctgggaaagatgaacgagctcggatccgtgtggagcacattatccgggaagactacctcgtggaggccatggagatcctggagctgtactgtgacctgctgctggctcggtttggccttatccagtctatgaaggaactagattctggtctggctgaatctgtgtctacattgatctgggctgctcctcgactccagtcagaagtggctgagttgaaaatagttgctgatcagctctgtgccaagtatagcaaggaatatggcaagctatgtaggaccaaccagattggaactgtgaatgacaggctaatgcacaagctgagtgtggaagccccacccaaaatcctggtggagagatacctgattgaaattgcaaagaattacaacgtaccctatgaacctgactctgtggtcatggcagaagctcctcctggggtagagacagatcttattgatgttggattcacagatgatgtgaagaaaggaggccctggaagaggagggagtggtggcttcacagcaccagttggtggacctgatggaacggtgccaatgcccatgcccatgcccatgcctatgccatctgcaaatacgcctttctcatatccactgccaaagggaccatcagatttcaatggactgccaatggggacttatcaggcctttcccaatattcatccacctcagataccagcaactcccccatcgtatgaatctattgttggtcctggacccaagccagaagcctctgcaaagcttccttccagacctgcagataactatgacaactttgtcctaccagagttgccatctgtgccagacacactaccaactgcatctgctggtgccagcacctcagcatctgaagacattgactttgatgatctttcccggaggtttgaagagctgaaaaagaaaacataggtctcttaaaccaggcaactttcacgttttgggagttgagactgagcaatttctccttgtaacaaagaatctccatgaaattctgtttcatctgttaaccgtcactcagcacaacactccctctgggctctcttcctgctcctccagattctgctgctttccagttctctgttgatcctgagactaacagttggagactgaggccagagcaactggctcctggcagctgtgcttgtccgtttcctgtcagagtgatcccaggtttcctcctggcccgtcccatggtccctccacaggagtgtgagaggatgggggaagcactgtgggaagaccaccaaagatggctggacagtgggagagagcacgttgtgaagcatcccagcctcgtgttgaggttccagacttagaaacagacccctctgtacagggggattgtggtgagtgagaatcaaggccaccttgtgtgttttctcactctcgaatgcaagtgggagagggaaaatgactcgggacgccattgtaacggttcctggaagctgggccctctcattggcatatacagtactcctcgctgcagggcactgtcccaccgggatccagttgcaaagtttgtcttgacagttgaaggcctcgcttagttgtactggattctcagggagccctctgtggccttttgctttgcgtgctgtttcccttgtaccagagggcggcaccgtggaaattctgttttccctgtagcatattgtgttggattgcattactggcagagaaaggacaaggtgccattcaagtcctagggtgggcttccagctgccttaatagaagtactcaagtcttttgggtagtgagctggaaagcctacaggaaaagaggggtacctgttttcatttgaaaactttgattcatggaacctttaaaactaatctcagaaaaatttttggtgcccatgcagctgtagttgttcactgctttcctggatggatgggactcttatgtcataacttctgttactcctttggcccatagctaaggtcatccttccccacaggggtggctttgggattggatgatacagcttttgcttctgtgtagtatacctgtacatacttgtttcaggcagcctttctttaatgttttcagttggtttgtattctgtagctcagtagctgctaataaagttaaagatcctg

SEQ ID NO: 110 - protein, 352 aa, Homo sapiens [sequence omitted]

SEQ ID NO: 111 - DNA, 1554 bp, Homo sapiens
  CDS (98)..(769)
gtgctgaggccgagggagtcgccattttggatggtgaaccctgaagtcggtgtctgctgcgttcacggcaggattcggttaggaggaacagcacagcatgctgggctctggatttaaagctgagcgcttaagagtgaatttgagattagtcataaatcgccttaaactattggagaaaaagaaaacggaactggcccagaaagcaaggaaggagattgctgactatctggctgctgggaaagatgaacgagctcggatccgtgtggagcacattatccgggaagactacctcgtggaggccatggagatcctggagctgtactgtgacctgctgctggctcggtttggccttatccagtctatgaaggaactagattctggtctggctgaatctgtgtctacattgatctgggctgctcctcgactccagtcagaagtggctgagttgaaaatagttgctgatcagctctgtgccaagtatagcaaggaatatggcaagctatgtaggaccaaccagattggaactgtgaatgacaggctaatgcacaagctgagtgtggaagccccacccaaaatcctggtggagagatacctgattgaaattgcaaagaattacaacgtaccctatgaacctgactctgtggtcatggtccctccacaggagtgtgagaggatgggggaagcactgtgggaagaccaccaaagatggctggacagtgggagagagcacgttgtgaagcatcccagcctcgtgttgaggttccagacttagaaacagacccctctgtacagggggattgtggtgagtgagaatcaaggccaccttgtgtgttttctcactctcgaatgcaagtgggagagggaaaatgactcgggacgccattgtaacggttcctggaagctgggccctctcattggcatatacagtactcctcgctgcagggcactgtcccaccgggatccagttgcaaagtttgtcttgacagttgaaggcctcgcttagttgtactggattctcagggagccctctgtggccttttgctttgcgtgctgtttcccttgtaccagagggcggcaccgtggaaattctgttttcctgtagcatattgtgttggattgcattactggcagagaaaggacaaggtgccattcaagtcctagggtgggcttccagctgccttaatagaagtactcaagtcttttgggtagtgagctggaaagcctacaggaaaagaggggtacctgttttcatttgaaaactttgattcatggaacctttaaaactaatctcggaaaaatttttggtgcccatgcagctgtagttgttcactgctttcctggatggatgggactcttatgtcataacttctgttactcctttggcccatagctaaggtcatccttccccacaggggtggctttgggattggatgatacagcttttgcttctgtgtagtatacctgtacatacttgtttcaggcagcctttctttaatgttttcagttggtttgtattctgtagctcagtagctgctaataaagttaaagatcctg

SEQ ID NO: 112 - protein, 224 aa, Homo sapiens
MLGSGFKAERLRVNLRLVINRLKLLEKKKTELAQKARKEIADYLAAGKDERARIRVEHIIREDYLVEAMEILELYCDLLLARFGLIQSMKELDSGLAESVSTLIWAAPRLQSEVAELKIVADQLCAKYSKEYGKLCRTNQIGTVNDRLMHKLSVEAPPKILVERYLIEIAKNYNVPYEPDSVVMVPPQECERMGEALWEDHQRWLDSGREHVVKHPSLVLRFQT

SEQ ID NO: 113 - DNA, 2386 bp, Homo sapiens
  CDS (98)..(1189)
gtgctgaggccgagggagtcgccattttggatggtgaaccctgaagtcggtgtctgctgcgttcacggcaggattcggttaggaggaacagcacagcatgctgggctctggatttaaagctgagcgcttaagagtgaatttgagattagtcataaatcgccttaaactattggagaaaaagaaaacggaactggcccagaaagcaaggaaggagattgctgactatctggctgctgggaaagatgaacgagctcggatccgtgtggagcacattatccgggaagactacctcgtggaggccatggagatcctggagctgtactgtgacctgctgctggctcggtttggccttatccagtctatgaaggaactagattctggtctggctgaatctgtgtctacattgatctgggctgctcctcgactccagtcagaagtggctgagttgaaaatagttgctgatcagctctgtgccaagtatagcaaggaatatggcaagctatgtaggaccaaccagattggaactgtgaatgacaggctaatgcacaagctgagtgtggaagccccacccaaaatcctggtggagagatacctgattgaaattgcaaagaattacaacgtaccctatgaacctgactctgtggtcatggcagaagctcctcctggggtagagacagatcttattgatgttggattcacagatgatgtgaagaaaggaggccctggaagaggagggagtggtggcttcacagcaccagttggtggacctgatggaacggtgccaatgcccatgcccatgcctatgccatctgcaaatacgcctttctcatatccactgccaaagggaccatcagatttcaatggactgccaatggggacttatcaggcctttcccaatattcatccacctcagataccagcaactcccccatcgtatgaatctgtagatgacattaatgctgataagaatatctcttctgcacagattgttggtcctggacccaagccagaagcctctgcaaagcttccttccagacctgcagataactatgacaactttgtcctaccagagttgccatctgtgccagacacactaccaactgcatctgctggtgccagcacctcagcatctgaagacattgactttgatgatctttcccggaggtttgaagagctgaaaaagaaaacataggtctcttaaaccaggcaactttcacgttttgggagttgagactgagcaatttctccttgtaacaaagaatctccatgaaattctgtttcatctgttaaccgtcactcagcacaacactccctctgggctctcttcctgctcctccagattctgctgctttccagttctctgttgatcctgagactaacagttggagactgaggccagagcaactggctcctggcagctgtgcttgtccgtttcctgtcagagtgatcccaggtttcctcctggcccgtcccatggtccctccacaggagtgtgagaggatgggggaagcactgtgggaagaccaccaaagatggctggacagtgggagagagcacgttgtgaagcatcccagcctcgtgttgaggttccagacttagaaacagacccctctgtacagggggattgtggtgagtgagaatcaaggccaccttgtgtgttttctcactctcgaatgcaagtgggagagggaaaatgactcgggacgccattgtaacggttcctggaagctgggccctctcattggcatatacagtactcctcgctgcagggcactgtcccaccgggatccagttgcaaagtttgtcttgacagttgaaggcctcgcttagttgtactggattctcagggagccctctgtggccttttgctttgcgtgctgtttcccttgtaccagagggcggcaccgtggaaattctgttttccctgtagcatattgtgttggattgcattactggcagagaaaggacaaggtgccattcaagtcctagggtgggcttccagctgccttaatagaagtactcaagtcttttgggtagtgagctggaaagcctacaggaaaagaggggtacctgttttcatttgaaaactttgattcatggaacctttaaaactaatctcagaaaaatttttggtgcccatgcagctgtagttgttcactgctttcctggatggatgggactcttatgtcataacttctgttactcctttggcccatagctaaggtcatccttccccacaggggtggctttgggattggatgatacagcttttgcttctgtgtagtatacctgtacatacttgtttcaggcagcctttctttaatgttttcagttggtttgtattctgtagctcagtagctgctaataaagttaaagatcctgtgtc

SEQ ID NO: 114 - protein, 364 aa, Homo sapiens
MLGSGFKAERLRVNLRLVINRLKLLEKKKTELAQKARKEIADYLAAGKDERARIRVEHIIREDYLVEAMEILELYCDLLLARFGLIQSMKELDSGLAESVSTLIWAAPRLQSEVAELKIVADQLCAKYSKEYGKLCRTNQIGTVNDRLMHKLSVEAPPKILVERYLIEIAKNYNVPYEPDSVVMAEAPPGVETDLIDVGFTDDVKKGGPGRGGSGGFTAPVGGPDGTVPMPMPMPMPSANTPFSYPLPKGPSDFNGLPMGTYQAFPNIHPPQIPATPPSYESVDDINADKNISSAQIVGPGPKPEASAKLPSRPADNYDNFVLPELPSVPDTLPTASAGASTSASEDIDFDDLSRRFEELKKKT

SEQ ID NO: 115 - DNA, 1352 bp, Homo sapiens
  CDS (82)..(1071)
gttttccgccgtccgtccgggcgggcgggcgcagagtcccgcgggcggcgcggaagcggcggcggcgcggccggggcagccatgtcgccattgtctgcggcgcgggcggccctgcgggtctacgcggtaggcgccgcggtgatcctggcgcagctgctgcggcgctgccgcgggggcttcctggagccagttttccccccacgacctgaccgtgtcgctatagtgacgggagggacagatggcattggctattctacagcgaagcatctggcgagacttggcatgcatgttatcatagctggaaataatgacagcaaagccaaacaagttgtaagcaaaataaaagaagaaaccttgaacgacaaagtggaatttttatactgtgacttggcttccatgacttccatccggcagtttgtgcagaagttcaagatgaagaagattcctctccatgtcctgatcaacaatgctggggtgatgatggtccctcagaggaaaaccagagatggattcgaagaacatttcggcctgaactacctagggcacttcctgctgaccaaccttctcttggatacgctgaaagagtctgggtcccctggccacagtgcgagggtggtcaccgtctcctctgccacccattacgtcgctgagctgaacatggatgaccttcagagcagtgcctgctactcaccccacgcagcctacgcccagagcaagctggcccttgtcctgttcacctaccacctccagcggctgctggcggctgagggaagccacgtgaccgccaacgtggtggaccccggggtggtcaacacggacctctacaagcacgtgttctgggccacccgtctggcgaagaagcttctcggctggttgcttttcaagacccccgatgaaggagcgtggacttccatctacgcagcagtcaccccagagctggaaggagttggtggccgttacctatacaacgagaaagagaccaagtccctccacgtcacctacaaccagaaactgcagcagcagctgtggtctaagagttgtgagatgactggggtccttgatgtgaccctgtgatatcctgtctcaggatagctgctgccccaagaaacacattgcacctgccaatagcttgtgggtctgtgaagactgcggtgtttgagtttctcacacccacctgcccacagggctctgtcctctagttttgagacagctgcctcaacctctgcagaacttcaagaagccaaataaacattttggaggataatcaccccaagtggtcttcaaccataaactttgtgattccaaagtgcccagttgtcacaggtgccataaataattacattttccaacat

SEQ ID NO: 116 - protein, 330 aa, Homo sapiens
MSPLSAARAALRVYAVGAAVILAQLLRRCRGGFLEPVFPPRPDRVAIVTGGTDGIGYSTAKHLARLGMHVIIAGNNDSKAKQVVSKIKEETLNDKVEFLYCDLASMTSIRQFVQKFKMKKIPLHVLINNAGVMMVPQRKTRDGFEEHFGLNYLGHFLLTNLLLDTLKESGSPGHSARVVTVSSATHYVAELNMDDLQSSACYSPHAAYAQSKLALVLFTYHLQRLLAAEGSHVTANVVDPGVVNTDLYKHVFWATRLAKKLLGWLLFKTPDEGAWTSIYAAVTPELEGVGGRYLYNEKETKSLHVTYNQKLQQQLWSKSCEMTGVLDVTL

SEQ ID NO: 117 - DNA, 842 bp, Homo sapiens
  CDS (9)..(755)
gagcggcgatgccggggcggcggcgcccgagtccggagcccgagcccgaagaggagccgccccggccccgcgcccccccgggagctccgggccctgggcctggttcgggagcccccggcagccaagaggaggaggaggagccgggactggtcgagggtgacccgggggacggcgccattgaggacccggagctggaagctatcaaagctcgagtcagggagatggaggaagaagctgagaagctaaaggagctacagaacgaggtagagaagcagatgaatatgagtccacctccaggcaatgctggcccggtgatcatgtccattgaggagaagatggaggctgatgcccgttccatctatgttggcaatgtggactatggtgcaacagcagaagagctggaagctcactttcatggctgtggttcagtcaaccgtgttaccatactgtgtgacaaatttagtggccatcccaaagggtttgcgtatatagagttctcagacaaagagtcagtgaggacttccttggccttagatgagtccctatttagaggaaggcaaatcaaggtgatcccaaaacgaaccaacagaccaggcatcagcacaacagaccggggttttccacgagcccgctaccgcgcccggaccaccaactacaacagctcccgctctcgattctacagtggttttaacagcaggccccggggtcgcgtctacaggggccgggctagagcgacatcatggtattccccttactaaaaaaagtgtgtattaggaggagagagaggaaaaaaagaggaaagaaggaaaaaaaaaagaattaaaaaaaaaaaaaagaaaaac

SEQ ID NO: 118 - protein, 249 aa, Homo sapiens
MPGRRRPSPEPEPEEEPPRPRAPPGAPGPGPGSGAPGSQEEEEEPGLVEGDPGDGAIEDPELEAIKARVREMEEEAEKLKELQNEVEKQMNMSPPPGNAGPVIMSIEEKMEADARSIYVGNVDYGATAEELEAHFHGCGSVNRVTILCDKFSGHPKGFAYIEFSDKESVRTSLALDESLFRGRQIKVIPKRTNRPGISTTDRGFPRARYRARTTNYNSSRSRFYSGFNSRPRGRVYRGRARATSWYSPY

SEQ ID NO: 119 - DNA, 1005 bp, Homo sapiens
  CDS (1)..(918)
atggcggcggcggcggcggcggcagcagcagcgggggctgcgggcggtcggggctccgggccggggcggcggcgccatcttgtgcccggggccggtggggaggccggggagggggccccggggggcgcaggggactacgggaacggcctggagtctgaggaactggagcctgaggagctgctgctggagcccgagccggagcccgagcccgaagaggagccgccccggccccgcgcccccccgggagctccgggccctgggcctggttcgggagcccccggcagccaagaggaggaggaggagccgggactggtcgagggtgacccgggggacggcgccattgaggacccggagctggaagctatcaaagctcgagtcagggagatggaggaagaagctgagaagctaaaggagctacagaacgaggtagagaagcagatgaatatgagtccacctccaggcaatgctggcccggtgatcatgtccattgaggagaagatggaggctgatgcccgttccatctatgttggcaatgtggactatggtgcaacagcagaagagctggaagctcactttcatggctgtggttcagtcaaccgtgttaccatactgtgtgacaaatttagtggccatcccaaagggtttgcgtatatagagttctcagacaaagagtcagtgaggacttccttggccttagatgagtccctatttagaggaaggcaaatcaaggtgatcccaaaacgaaccaacagaccaggcatcagcacaacagaccggggttttccacgagcccgctaccgcgcccggaccaccaactacaacagctcccgctctcgattctacagtggttttaacagcaggccccggggtcgcgtctacaggggccgggctagagcgacatcatggtattccccttactaaaaaaagtgtgtattaggaggagagagaggaaaaaaagaggaaagaaggaaaaaaaaaagaattaaaaaaaaaaaaaagaaaaac

SEQ ID NO: 120 - protein, 306 aa, Homo sapiens
MAAAAAAAAAAGAAGGRGSGPGRRRHLVPGAGGEAGEGAPGGAGDYGNGLESEELEPEELLLEPEPEPEPEEEPPRPRAPPGAPGPGPGSGAPGSQEEEEEPGLVEGDPGDGAIEDPELEAIKARVREMEEEAEKLKELQNEVEKQMNMSPPPGNAGPVIMSIEEKMEADARSIYVGNVDYGATAEELEAHFHGCGSVNRVTILCDKFSGHPKGFAYIEFSDKESVRTSLALDESLFRGRQIKVIPKRTNRPGISTTDRGFPRARYRARTTNYNSSRSRFYSGFNSRPRGRVYRGRARATSWYSPY

SEQ ID NO: 121 - DNA, 2668 bp, Homo sapiens
  CDS (229)..(1539)
gaaaaaaacaaaatcttgtcagaagcactggagacgctggccactgaacatcatgaattagagcagtctctggtgaaaggctctccacccgccagcatccttagcgaggacgagttctatgatgcgctgtcagattccgagtccgaaaggtccctgagtagattggaagcagtgacagcacgctcctttgaagaggaaggagagcatttgggcagtagaaaacacagaatgtccgaagaaaaagactgtggtggcggagatgctctctccaatggcatcaagaaacacagaacaagtttgccttctcctatgttttccagaaatgacttcagtatctggagcatcctcagaaaatgtattggaatggaactatccaagatcacgatgccagttatatttaatgagcctctgagcttcctacagcgcctaactgaatacatggagcatacttacctcatccacaaggccagttcactctctgatcctgtggaaaggatgcagtgtgtagctgcgtttgctgtatctgctgttgcttctcagtgggaacggactggaaaacctttcaacccactgctgggagagacttatgaattagtgcgagatgaccttggatttagactcatctccgaacaggtcagccatcacccaccaatcagtgcatttcatgctgaaggattaaacaatgacttcatctttcatggctctatctatcccaaactgaaattctgggggaagagtgtagaagcagaacccaaaggaaccatcaccttggagctccttgaacacaatgaggcatatacatggacaaatcccacctgctgtgtgcataatatcattgtgggtaaactgtggatcgaacagtatggcaatgtggaaattataaaccacaagactggggacaaatgtgtgttgaattttaagccatgtggcctttttggtaaggaattacacaaagttgaaggctacattcaagataaaagcaaaaagaagctctgtgccctctatgggaagtggactgaatgtttatacagtgttgaccctgccacgtttgacgcttacaaaaaaaatgataagaaaaatacagaagagaagaagaacagcaaacagatgagcacctctgaggagttggatgaaatgccagtgccggattctgaaagtgtattcattatccctggaagcgttcttctatggcgaatagccccacggcctccaaattctgcccagatgtataattttactagttttgcaatggttttgaatgaagtagacaaagacatggagagtgtgattcccaagacagactgcaggttacggcctgacatcagagccatggaaaatggagagatagatcaagctagtgaagaaaaaaaacgacttgaggaaaaacaaagagcagcccgcaaaaacaggtccaagtcagaagaggactggaagacgaggtggttccatcaaggtcctaatccctacaatggagcacaggactggatttactctggcagctactgggacagaaattacttcaatttgcctgacatttattaaaatgcatacaagtcagggtgtttggctaatctacaaataagtcttaaacctatgtttttaaatttttttcccttggtttctacttatcttttaaaaaaaaaatgaaaaaacactcatgagataactgcatttcacccaacaaaagcagggtataaggcgatattggtgatgaaagtcttaggaaaaatgcataattttgctataaaatgtacttatttggaatactattttatatagaggtaagagaacactgctggggaatatgctttttatggttgctgttgccatatttactgaaggtttatacctaaatgtaactttagctttatggaactatatagtaatcccaaatcaagttattttgaatatttttatgctgtcatgcttgaatgttttagatgtaacctttgacatatttagaactctcctcctatacaatgtttattctcagatatagaggttatgtcattttataaagacttcattgataagatggcttttattcatactaatcctcccaatgttaccccttccatcttccaagaagaaaaaaaatgcctgaatattcagaatagatatttctgatttgaaaattctaaagaattaaactggaaaagtatttcatttacttagtgctctgaatttacttttacagttttctgcagtcagtatcattaaaatggttaagtttacatttgaactgaaaatatgtataaaatctagcaattcacaaaaatgccctagaaatatagattttaatcaccattacataatgacaaaccttgttaaatgcttccacttccagtggcaaatgccactagggaaagtaagttgcactcatgtaagtatcaaactatataaaaggaggccttgtgcatttcaagtttgcaaagtacctgtgtacttaaaatatgtgtggagacctactgtacagtagttttgcccctttaattggggcacattcatcttaaatcttatagtatttatccacccaaaccccagactgagatactgctcccaggggcctaggtagctgccagtccgtgattttaattgctgtcttgaagttaacaagtgttataatgaaataatctacctgatgctaaataaaggctttagaatgttc

SEQ ID NO: 122 - protein, 437 aa, Homo sapiens
MSEEKDCGGGDALSNGIKKHRTSLPSPMFSRNDFSIWSILRKCIGMELSKITMPVIFNEPLSFLQRLTEYMEHTYLIHKASSLSDPVERMQCVAAFAVSAVASQWERTGKPFNPLLGETYELVRDDLGFRLISEQVSHHPPISAFHAEGLNNDFIFHGSIYPKLKFWGKSVEAEPKGTITLELLEHNEAYTWTNPTCCVHNIIVGKLWIEQYGNVEIINHKTGDKCVLNFKPCGLFGKELHKVEGYIQDKSKKKLCALYGKWTECLYSVDPATFDAYKKNDKKNTEEKKNSKQMSTSEELDEMPVPDSESVFIIPGSVLLWRIAPRPPNSAQMYNFTSFAMVLNEVDKDMESVIPKTDCRLRPDIRAMENGEIDQASEEKKRLEEKQRAARKNRSKSEEDWKTRWFHQGPNPYNGAQDWIYSGSYWDRNYFNLPDIY

SEQ ID NO: 123 - DNA, 4153 bp, Homo sapiens
  CDS (175)..(3024)
ccgtggtcccggcgccgggtcccggagacagacgttacgcgggctcgagcgtcctcggggagtgccagccagagttggtgacgaccacttcctcgacgtggggcgggcggacgggaagcctggggtcgtggccaccgcctcgggagctctgggagcccgggtgaccgcgtagaaatgaacacagaagcggagcaacagcttctccatcacgccagaaatggcaatgctgaagaagtaagacaactattagagaccatggcgaggaatgaagtgattgctgacattaattgcaaaggaagaagtaagtctaacttgggctggacacctctacatctggcatgctattttggacacagacaagtggtccaggatctgttgaaggctggtgcagaagtgaatgtgttgaatgacatgggagacacgccgcttcatcgagctgcctttacaggacgaaaggagttggtaatgcttctcttagaatataatgctgatactactattgttaatgggagtggacagacagcaaaagaagttactcatgctgaagaaatcagaagcatgcttgaagctgtagaaaggactcaacaaagaaagcttgaagaattacttttagcagcagcaagagaaggcaaaacaacagaactcacagctctgctcaacaggcccaatcctcctgatgttaactgttcggatcagttaggaaatacacccttgcattgtgcagcttaccgggcccataaacaatgtgccttaaagcttctaagaagtggagcagaccctaatctgaagaacaaaaatgatcagaaacctcttgaccttgcccagggtgctgaaatgaaacacattcttgttggtaataaggtcatctacaaagcattgaaacgatatgagggccctctctggaagagttcaagattttttggctggagattattctgggtagtgttagagcatggagtcctttcatggtataggaaacagcctgatgcagttcataatatttatcgccagggatgcaaacacctgactcaagcagtatgcacggtaaaatccactgatagctgcctcttctttattaaatgctttgatgacaccattcatggcttccgggttcctaagaatagccttcagcagtcaagagaggactggctggaagcaatagaagaacattctgcttacagcactcactactgttcccaggaccagctgactgatgaggaggaggaagatacggtttctgctgcagacctgaagaaatcattagagaaagcacagtcatgccaacagcgactagatagggaaatttccaactttctcaaaatgattaaggagtgtgacatggctaaagaaatgcttccatcatttcttcagaaagttgaagttgtctcagaagcttctagagaaacttgtgtagctttgactgattgccttaatctcttcaccaaacaagaaggggtgaggaattttaaattggaacaagagcaagaaaaaaacaaaatcttgtcagaagcactggagacgctggccactgaacatcatgaattagagcagtctctggtgaaaggctctccacccgccagcatccttagcgaggacgagttctatgatgcgctgtcagattccgagtccgaaaggtccctgagtagattggaagcagtgacagcacgctcctttgaagaggaaggagagcatttgggcagtagaaaacacagaatgtccgaagaaaaagactgtggtggcggagatgctctctccaatggcatcaagaaacacagaacaagtttgccttctcctatgttttccagaaatgacttcagtatctggagcatcctcagaaaatgtattggaatggaactatccaagatcacgatgccagttatatttaatgagcctctgagcttcctacagcgcctaactgaatacatggagcatacttacctcatccacaaggccagttcactctctgatcctgtggaaaggatgcagtgtgtagctgcgtttgctgtatctgctgttgcttctcagtgggaacggactggaaaacctttcaacccactgctgggagagacttatgaattagtgcgagatgaccttggatttagactcatctccgaacaggtcagccatcacccaccaatcagtgcatttcatgctgaaggattaaacaatgacttcatctttcatggctctatctatcccaaactgaaattctgggggaagagtgtagaagcagaacccaaaggaaccatcaccttggagctccttgaacacaatgaggcatatacatggacaaatcccacctgctgtgtgcataatatcattgtgggtaaactgtggatcgaacagtatggcaatgtggaaattataaaccacaagactggggacaaatgtgtgttgaattttaagccatgtggcctttttggtaaggaattacacaaagttgaaggctacattcaagataaaagcaaaaagaagctctgtgccctctatgggaagtggactgaatgtttatacagtgttgaccctgccacgtttgacgcttacaaaaaaaatgataagaaaaatacagaagagaagaagaacagcaaacagatgagcacctctgaggagttggatgaaatgccagtgccggattctgaaagtgtattcattatccctggaagcgttcttctatggcgaatagccccacggcctccaaattctgcccagatgtataattttactagttttgcaatggttttgaatgaagtagacaaagacatggagagtgtgattcccaagacagactgcaggttacggcctgacatcagagccatggaaaatggagagatagatcaagctagtgaagaaaaaaaacgacttgaggaaaaacaaagagcagcccgcaaaaacaggtccaagtcagaagaggactggaagacgaggtggttccatcaaggtcctaatccctacaatggagcacaggactggatttactctggcagctactgggacagaaattacttcaatttgcctgacatttattaaaatgcatacaagtcagggtgtttggctaatctacaaataagtcttaaacctatgtttttaaatttttttcccttggtttctacttatcttttaaaaaaaaaatgaaaaaacactcatgagataactgcatttcacccaacaaaagcagggtataaggcgatattggtgatgaaagtcttaggaaaaatgcataattttgctataaaatgtacttatttggaatactattttatatagaggtaagagaacactgctggggaatatgctttttatggttgctgttgccatatttactgaaggtttatacctaaatgtaactttagctttatggaactatatagtaatcccaaatcaagttattttgaatatttttatgctgtcatgcttgaatgttttagatgtaacctttgacatatttagaactctcctcctatacaatgtttattctcagatatagaggttatgtcattttataaagacttcattgataagatggcttttattcatactaatcctcccaatgttaccccttccatcttccaagaagaaaaaaaatgcctgaatattcagaatagatatttctgatttgaaaattctaaagaattaaactggaaaagtatttcatttacttagtgctctgaatttacttttacagttttctgcagtcagtatcattaaaatggttaagtttacatttgaactgaaaatatgtataaaatctagcaattcacaaaaatgccctagaaatatagattttaatcaccattacataatgacaaaccttgttaaatgcttccacttccagtggcaaatgccactagggaaagtaagttgcactcatgtaagtatcaaactatataaaaggaggccttgtgcatttcaagtttgcaaagtacctgtgtacttaaaatatgtgtggagacctactgtacagtagttttgcccctttaattggggcacattcatcttaaatcttatagtatttatccacccaaaccccagactgagatactgctcccaggggcctaggtagctgccagtccgtgattttaattgctgtcttgaagttaacaagtgttataatgaaataatctacctgatgctaaataaaggctttagaatgttc

SEQ ID NO: 124 - protein, 950 aa, Homo sapiens
MNTEAEQQLLHHARNGNAEEVRQLLETMARNEVIADINCKGRSKSNLGWTPLHLACYFGHRQVVQDLLKAGAEVNVLNDMGDTPLHRAAFTGRKELVMLLLEYNADTTIVNGSGQTAKEVTHAEEIRSMLEAVERTQQRKLEELLLAAAREGKTTELTALLNRPNPPDVNCSDQLGNTPLHCAAYRAHKQCALKLLRSGADPNLKNKNDQKPLDLAQGAEMKHILVGNKVIYKALKRYEGPLWKSSRFFGWRLFWVVLEHGVLSWYRKQPDAVHNIYRQGCKHLTQAVCTVKSTDSCLFFIKCFDDTIHGFRVPKNSLQQSREDWLEAIEEHSAYSTHYCSQDQLTDEEEEDTVSAADLKKSLEKAQSCQQRLDREISNFLKMIKECDMAKEMLPSFLQKVEVVSEASRETCVALTDCLNLFTKQEGVRNFKLEQEQEKNKILSEALETLATEHHELEQSLVKGSPPASILSEDEFYDALSDSESERSLSRLEAVTARSFEEEGEHLGSRKHRMSEEKDCGGGDALSNGIKKHRTSLPSPMFSRNDFSIWSILRKCIGMELSKITMPVIFNEPLSFLQRLTEYMEHTYLIHKASSLSDPVERMQCVAAFAVSAVASQWERTGKPFNPLLGETYELVRDDLGFRLISEQVSHHPPISAFHAEGLNNDFIFHGSIYPKLKFWGKSVEAEPKGTITLELLEHNEAYTWTNPTCCVHNIIVGKLWIEQYGNVEIINHKTGDKCVLNFKPCGLFGKELHKVEGYIQDKSKKKLCALYGKWTECLYSVDPATFDAYKKNDKKNTEEKKNSKQMSTSEELDEMPVPDSESVFIIPGSVLLWRIAPRPPNSAQMYNFTSFAMVLNEVDKDMESVIPKTDCRLRPDIRAMENGEIDQASEEKKRLEEKQRAARKNRSKSEEDWKTRWFHQGPNPYNGAQDWIYSGSYWDRNYFNLPDIY

SEQ ID NO: 125 - DNA, 2145 bp, Homo sapiens
  CDS (21)..(1208)
aatgttttggccgcttcaagatggcggtgcaggagtcggcggctcagttgtccatgaccctgaaggtccaggagtacccgaccctcaaggtgccctacgagacgctgaacaaacgctttcgcgctgctcagaagaacattgaccgggagaccagccacgtcaccatggtggtggccgagctggagaagacgttgagcggctgccccgccgtggactccgtggtcagcctgctggacggcgtggtggagaagctcagcgtcctcaagaggaaggcggtggaatccatccaggccgaggacgagagcgccaagctgtgcaagcgccggatcgagcacctcaaagagcatagcagcgaccagcccgcggcggccagcgtgtggaagaggaagcgcatggatcgcatgatggtggagcacctgctgcgttgcggctactacaacacggctgtcaagctggcgcgccagagcggcatcgaggacctagtgaatattgagatgttcctgacggccaaagaggtggaggagtccctggagaggcgtgagacggccacctgcctggcctggtgccatgacaacaagtcccggctccggaagatgaagagctgcctggagttcagcctcagaatccaggagttcattgaactcatccggcagaataagagactggacgctgtgagacatgcaagaaagcacttcagccaagcagaagggagccagctggacgaggtgcgccaggccatgggcatgctggccttcccgcccgacacgcacatctccccgtacaaggaccttctggaccctgcacggtggcggatgctgatccggcagttccggtacgacaactaccgactacaccagctgggaaacaattctgtgttcaccctcaccctgcaggccggcctctcagccatcaagacaccacagtgctacaaggaggacggcagctccaagagccctgactgccctgtgtgcagccgctccctgaacaagctggcgcagcccctgcccatggcccactgtgccaactcccgcctggtctgcaagatttctggcgacgtgatgaacgagaacaatccgcccatgatgctgcccaacggctacgtctacggctacaattctctgctttctatccgtcaagatgataaagtcgtgtgcccgagaaccaaagaagtcttccacttctcacaagccgagaaggtgtacatcatgtaggccccacgtcgtgaagcgcacgcctcggggacgggctgcagtgggcggggaggccacgccttcctcctgtcccacgctccagcctgccgcggcgtttctgtttcttgcgaccaaagatccgtgagcaacgataaatactcttaggaagagagaaaataaggtttcataagtttgtacttgaaaacatttggattggtaggattttgtaacacgtcaaccatttgatgcttctgaaaagtactttcaacttgcgaaggaaactcttctttaaagactgacctaaacaccgagggaaacttaagaacgtttaaaatataggagtccgtgatttccctgtgttttcagtttctttccttctgtgaacgatgagacttggagaacgggctggtccttcaccacttcctgttggccctggcctggccggggaaggtggcagcggcaccggactgacctgcagtgacccgcgatgccgcgccacgagggacacttatggcttcattcgagagctgctgccaaaacgcctggcgccgccaccgtcgggggctggcttcgaggacgcccgcctgcctcgcgggtcgtgtccgcgggactgtgttcgtacgtgcatagtttcgatatcacatcgcggggctgtgttcgtagctgcgtcgtttcgatatcacaccctctgtgtgccgccttacttcctgcttcgagaatgtataacgtggaaatccacgggaccaaatttctgcagaggccttgccggatggttccataactgtagagtctaattgctatccattacagaaattaatcgttcagttgaaagaagtactgatgacttttcaaaacaaatgaaccaccgtagctgacagagaaccgtatcgtagaggtttgtagttagtgcttatttttgcatgttgatgttgactagctaataaactgtaaatgt

SEQ ID NO: 126 - protein, 396 aa, Homo sapiens
MAVQESAAQLSMTLKVQEYPTLKVPYETLNKRFRAAQKNIDRETSHVTMVVAELEKTLSGCPAVDSVVSLLDGVVEKLSVLKRKAVESIQAEDESAKLCKRRIEHLKEHSSDQPAAASVWKRKRMDRMMVEHLLRCGYYNTAVKLARQSGIEDLVNIEMFLTAKEVEESLERRETATCLAWCHDNKSRLRKMKSCLEFSLRIQEFIELIRQNKRLDAVRHARKHFSQAEGSQLDEVRQAMGMLAFPPDTHISPYKDLLDPARWRMLIRQFRYDNYRLHQLGNNSVFTLTLQAGLSAIKTPQCYKEDGSSKSPDCPVCSRSLNKLAQPLPMAHCANSRLVCKISGDVMNENNPPMMLPNGYVYGYNSLLSIRQDDKVVCPRTKEVFHFSQAEKVYIM

SEQ ID NO: 127 - DNA, 2145 bp, Homo sapiens
  CDS (21)..(1208)
aatgttttggccgcttcaagatggcggtgcaggagtcggcggctcagttgtccatgaccctgaaggtccaggagtacccgaccctcaaggtgccctacgagacgctgaacaaacgctttcgcgctgctcagaagaacattgaccgggagaccagccacgtcaccatggtggtggccgagctggagaagacgttgagcggctgccccgccgtggactccgtggtcagcctgctggacggcgtggtggagaagctcagcgtcctcaagaggaaggcggtggaatccatccaggccgaggacgagagcgccaagctgtgcaagcgccggatcgagcacctcaaagagcatagcagcgaccagcccgcggcggccagcgtgtggaagaggaagcgcatggatcgcatgatggtggagcacctgctgcgttgcggctactacaacacggctgtcaagctggcgcgccagagcggcatcgaggacctagtgaatattgagatgttcctgacggccaaagaggtggaggagtccctggagaggcgtgagacggccacctgcctggcctggtgccatgacaacaagtcccggctccggaagatgaagagctgcctggagttcagcctcagaatccaggagttcattgaactcatccggcagaataagagactggacgctgtgagacatgcaagaaagcacttcagccaagcagaagggagccagctggacgaggtgcgccaggccatgggcatgctggccttcccgcccgacacgcacatctccccgtacaaggaccttctggaccctgcacggtggcggatgctgatccagcagttccggtacgacaactaccgactacaccagctgggaaacaattctgtgttcaccctcaccctgcaggccggcctctcagccatcaagacaccacagtgctacaaggaggacggcagctccaagagccctgactgccctgtgtgcagccgctccctgaacaagctggcgcagcccctgcccatggcccactgtgccaactcccgcctggtctgcaagatttctggcgacgtgatgaacgagaacaatccgcccatgatgctgcccaacggctacgtctacggctacaattctctgctttctatccgtcaagatgataaagtcgtgtgcccgagaaccaaagaagtcttccacttctcacaagccgagaaggtgtacatcatgtaggccccacgtcgtgaagcgcacgcctcggggacgggctgcagtgggcggggaggccacgccttcctcctgtcccacgctccagcctgccgcggcgtttctgtttcttgcgaccaaagatccgtgagcaacgataaatactcttaggaagagagaaaataaggtttcataagtttgtacttgaaaacatttggattggtaggattttgtaacacgtcaaccatttgatgcttctgaaaagtactttcaacttgcgaaggaaactcttctttaaagactgacctaaacaccgagggaaacttaagaacgtttaaaatataggagtccgtgatttccctgtgttttcagtttctttccttctgtgaacgatgagacttggagaacgggctggtccttcaccacttcctgttggccctggcctggccggggaaggtggcagcggcaccggactgacctgcagtgacccgcgatgccgcgccacgagggacacttatggcttcattcgagagctgctgccaaaacgcctggcgccgccaccgtcgggggctggcttcgaggacgcccgcctgcctcgcgggtcgtgtccgcgggactgtgttcgtacgtgcatagtttcgatatcacatcgcggggctgtgttcgtagctgcgtcgtttcgatatcacaccctctgtgtgccgccttacttcctgcttcgagaatgtataacgtggaaatccacgggaccaaatttctgcagaggccttgccggatggttccataactgtagagtctaattgctatccattacagaaattaatcgttcagttgaaagaagtactgatgacttttcaaaacaaatgaaccaccgtagctgacagagaaccgtatcgtagaggtttgtagttagtgcttatttttgcatgttgatgttgactagctaataaactgtaaatgt

SEQ ID NO: 128 - protein, 396 aa, Homo sapiens
MAVQESAAQLSMTLKVQEYPTLKVPYETLNKRFRAAQKNIDRETSHVTMVVAELEKTLSGCPAVDSVVSLLDGVVEKLSVLKRKAVESIQAEDESAKLCKRRIEHLKEHSSDQPAAASVWKRKRMDRMMVEHLLRCGYYNTAVKLARQSGIEDLVNIEMFLTAKEVEESLERRETATCLAWCHDNKSRLRKMKSCLEFSLRIQEFIELIRQNKRLDAVRHARKHFSQAEGSQLDEVRQAMGMLAFPPDTHISPYKDLLDPARWRMLIQQFRYDNYRLHQLGNNSVFTLTLQAGLSAIKTPQCYKEDGSSKSPDCPVCSRSLNKLAQPLPMAHCANSRLVCKISGDVMNENNPPMMLPNGYVYGYNSLLSIRQDDKVVCPRTKEVFHFSQAEKVYIM

SEQ ID NO: 129 - DNA, 1293 bp, Homo sapiens
  CDS (14)..(1123)
cggaactgaggccatgattaagagggacggccgggggcattcgtattgcgccgctagaggtgaaattcttggaccggcgcaagacggaccagagcgaaagcatttgccaagaatgttttcattaatcaagaacatccccgccgggctgcagtccatgaaccaggcgttgcagaggcgcttcgccaagggggtgcagtacaacatgaagatagtgatccggggagacaggaacacgggcaagacagcgctgtgtccacggggagctccagccccggcacaccccagcccgccccacagctgcccctcaatgccgccccaccatcctctgtgccccctgtaccaccctcagaggccctgcccccacctgcgtgcccctcagcccccgccccacggcgcagcatcatctctaggctgtttgggacgtcacctgccaccgaggcagcccctccacctccagagccagtcccggccgcagagggcccagcaacggtccagagtgtggaggactttgttcctgacgaccgcctggaccgcagcttcctggaagacacaacccccgccagggacgagaagaaggtgggggccaaggctgcccagcaggacagcgacagtgatggggaggccctgggcggcaacccgatggtggcagggttccaggacgatgtggacctcgaagaccagccacgtgggagtcccccgctgcctgcaggccccgtccccagtcaagacatcactctttcgagtgaggaggaagcagaagtggcagctcccacaaaaggccctgccccagctccccagcagtgctcagagccagagaccaagtggtcctccataccagcttcgaagccacggagggggacagctcccacgaggaccgcagcacccccctggccaggcggtgtctctgttcgcacaggtccggagaagcgcagcagcaccaggccccctgctgagatggagccggggaagggtgagcaggcctcctcgtcggagagtgaccccgagggacccattgctgcacaaatgctgtccttcgtcatggatgaccccgactttgagagcgagggatcagacacacagcgcagggcggatgactttcccgtgcgagatgacccctccgatgtgactgacgaggatgagggccctgccgagccgcccccaccccccaagctccctctccccgccttcagactgaagaatgactcggacctcttcgggctggggctggaggaggccggacccaaggagagcagtgaggaaggtaaggagggcaaaaccccctctaaggagaag

SEQ ID NO: 130 - protein, 370 aa, Homo sapiens
MIKRDGRGHSYCAARGEILGPAQDGPERKHLPRMFSLIKNIPAGLQSMNQALQRRFAKGVQYNMKIVIRGDRNTGKTALCPRGAPAPAHPSPPHSCPSMPPHHPLCPLYHPQRPCPHLRAPQPPPHGAASSLGCLGRHLPPRQPLHLQSQSRPQRAQQRSRVWRTLFLTTAWTAASWKTQPPPGTRRRWGPRLPSRTATVMGRPWAATRWWQGSRTMWTSKTSHVGVPRCLQAPSPVKTSLFRVRRKQKWQLPQKALPQLPSSAQSQRPSGPPYQLRSHGGGQLPRGPQHPPGQAVSLFAQVRRSAAAPGPLLRWSRGRVSRPPRRRVTPRDPLLHKCCPSSWMTPTLRARDQTHSAGRMTFPCEMTPPM

SEQ ID NO: 131 - DNA, 1163 bp, Homo sapiens
  CDS (25)..(993)
aacatccccgccgggctgcagtccatgaaccaggcgttgcagaggcgcttcgccaagggggtgcagtacaacatgaagatagtgatccggggagacaggaacacgggcaagacagcgctgtgtccacggggagctccagccccggcacaccccagcccgccccacagctgcccctcaatgccgccccaccatcctctgtgccccctgtaccaccctcagaggccctgcccccacctgcgtgcccctcagcccccgccccacggcgcagcatcatctctaggctgtttgggacgtcacctgccaccgaggcagcccctccacctccagagccagtcccggccgcagagggcccagcaacggtccagagtgtggaggactttgttcctgacgaccgcctggaccgcagcttcctggaagacacaacccccgccagggacgagaagaaggtgggggccaaggctgcccagcaggacagcgacagtgatggggaggccctgggcggcaacccgatggtggcagggttccaggacgatgtggacctcgaagaccagccacgtgggagtcccccgctgcctgcaggccccgtccccagtcaagacatcactctttcgagtgaggaggaagcagaagtggcagctcccacaaaaggccctgccccagctccccagcagtgctcagagccagagaccaagtggtcctccataccagcttcgaagccacggagggggacagctcccacgaggaccgcagcacccccctggccaggcggtgtctctgttcgcacaggtccggagaagcgcagcagcaccaggccccctgctgagatggagccggggaagggtgagcaggcctcctcgtcggagagtgaccccgagggacccattgctgcacaaatgctgtccttcgtcatggatgaccccgactttgagagcgagggatcagacacacagcgcagggcggatgactttcccgtgcgagatgacccctccgatgtgactgacgaggatgagggccctgccgagccgcccccaccccccaagctccctctccccgccttcagactgaagaatgactcggacctcttcgggctggggctggaggaggccggacccaaggagagcagtgaggaaggtaaggagggcaaaaccccctctaaggagaag

SEQ ID NO: 132 - protein, 323 aa, Homo sapiens
MNQALQRRFAKGVQYNMKIVIRGDRNTGKTALCPRGAPAPAHPSPPHSCPSMPPHHPLCPLYHPQRPCPHLRAPQPPPHGAASSLGCLGRHLPPRQPLHLQSQSRPQRAQQRSRVWRTLFLTTAWTAASWKTQPPPGTRRRWGPRLPSRTATVMGRPWAATRWWQGSRTMWTSKTSHVGVPRCLQAPSPVKTSLFRVRRKQKWQLPQKALPQLPSSAQSQRPSGPPYQLRSHGGGQLPRGPQHPPGQAVSLFAQVRRSAAAPGPLLRWSRGRVSRPPRRRVTPRDPLLHKCCPSSWMTPTLRARDQTHSAGRMTFPCEMTPPM

SEQ ID NO: 133 - DNA, 1905 bp, Homo sapiens
  CDS (788)..(1735)
aacatccccgccgggctgcagtccatgaaccaggcgttgcagaggcgcttcgccaagggggtgcagtacaacatgaagatagtgatccggggagacaggaacacgggcaagacagcgctgtggcaccgcctgcagggccggccgttcgtggaggagtacatccccacacaggagatccaggtcaccagcatccactggagctacaagaccacggatgacatcgtgaaggttgaagtctgggatgtagtagacaaaggaaaatgcaaaaagcgaggcgacggcttaaagatggagaacgacccccaggaggcggagtctgaaatggccctggatgctgagttcctggacgtgtacaagaactgcaacggggtggtcatgatgttcgacattaccaagcagtggaccttcaattacattctccgggagcttccaaaagtgcccacccacgtgccagtgtgcgtgctggggaactaccgggacatgggcgagcaccgagtcatcctgccggacgacgtgcgtgacttcatcgacaacctggacagacctccaggttcctcctacttccgctatgctgagtcttccatgaagaacagcttcggcctaaagtaccttcataagttcttcaatatcccatctttgcagcttcagagggagacgctgttgcggcagctggagacgaaccagctggacatggacgccacgctggaggagctgtcggtgcagcaggagacggaggaccagaactacggcatcttcctggagatgatggaggctcgcagccgtggccatgcgtccccactggcggctaacgggcagagcccatccccgggctcccagtcaccagtggtgcctgcaggcgctgtgtccacggggagctccagccccggcacaccccagcccgccccacagctgcccctcaatgccgccccaccatcctctgtgccccctgtaccaccctcagaggccctgcccccacctgcgtgcccctcagcccccgccccacggcgcagcatcatctctaggctgtttgggacgtcacctgccaccgaggcagcccctccacctccagagccagtcccggccgcagagggcccagcaacggtccagagtgtggaggactttgttcctgacgaccgcctggaccgcagcttcctggaagacacaacccccgccagggacgagaagaaggtgggggccaaggctgcccagcaggacagcgacagtgatggggaggccctgggcggcaacccgatggtggcagggttccaggacgatgtggacctcgaagaccagccacgtgggagtcccccgctgcctgcaggccccgtccccagtcaagacatcactctttcgagtgaggaggaagcagaagtggcagctcccacaaaaggccctgccccagctccccagcagtgctcagagccagagaccaagtggtcctccataccagcttcgaagccacggagggggacagctcccacgaggaccgcagcacccccctggccaggcggtgtctctgttcgcacaggtccggagaagcgcagcagcaccaggccccctgctgagatggagccggggaagggtgagcaggcctcctcgtcggagagtgaccccgagggacccattgctgcacaaatgctgtccttcgtcatggatgaccccgactttgagagcgagggatcagacacacagcgcagggcggatgactttcccgtgcgagatgacccctccgatgtgactgacgaggatgagggccctgccgagccgcccccaccccccaagctccctctccccgccttcagactgaagaatgactcggacctcttcgggctggggctggaggaggccggacccaaggagagcagtgaggaaggtaaggagggcaaaaccccctctaaggagaag

SEQ ID NO: 134 - protein, 316 aa, Homo sapiens
MRPHWRLTGRAHPRAPSHQWCLQALCPRGAPAPAHPSPPHSCPSMPPHHPLCPLYHPQRPCPHLRAPQPPPHGAASSLGCLGRHLPPRQPLHLQSQSRPQRAQQRSRVWRTLFLTTAWTAASWKTQPPPGTRRRWGPRLPSRTATVMGRPWAATRWWQGSRTMWTSKTSHVGVPRCLQAPSPVKTSLFRVRRKQKWQLPQKALPQLPSSAQSQRPSGPPYQLRSHGGGQLPRGPQHPPGQAVSLFAQVRRSAAAPGPLLRWSRGRVSRPPRRRVTPRDPLLHKCCPSSWMTPTLRARDQTHSAGRMTFPCEMTPPM

SEQ ID NO: 135 - DNA, 1905 bp, Homo sapiens; identical to SEQ ID NO: 133
  CDS (25)..(1905)

SEQ ID NO: 136 - protein, 627 aa, Homo sapiens
MNQALQRRFAKGVQYNMKIVIRGDRNTGKTALWHRLQGRPFVEEYIPTQEIQVTSIHWSYKTTDDIVKVEVWDVVDKGKCKKRGDGLKMENDPQEAESEMALDAEFLDVYKNCNGVVMMFDITKQWTFNYILRELPKVPTHVPVCVLGNYRDMGEHRVILPDDVRDFIDNLDRPPGSSYFRYAESSMKNSFGLKYLHKFFNIPSLQLQRETLLRQLETNQLDMDATLEELSVQQETEDQNYGIFLEMMEARSRGHASPLAANGQSPSPGSQSPVVPAGAVSTGSSSPGTPQPAPQLPLNAAPPSSVPPVPPSEALPPPACPSAPAPRRSIISRLFGTSPATEAAPPPPEPVPAAEGPATVQSVEDFVPDDRLDRSFLEDTTPARDEKKVGAKAAQQDSDSDGEALGGNPMVAGFQDDVDLEDQPRGSPPLPAGPVPSQDITLSSEEEAEVAAPTKGPAPAPQQCSEPETKWSSIPASKPRRGTAPTRTAAPPWPGGVSVRTGPEKRSSTRPPAEMEPGKGEQASSSESDPEGPIAAQMLSFVMDDPDFESEGSDTQRRADDFPVRDDPSDVTDEDEGPAEPPPPPKLPLPAFRLKNDSDLFGLGLEEAGPKESSEEGKEGKTPSKEK

SEQ ID NO: 137 - DNA, 2636 bp, Homo sapiens
  CDS (327)..(1403)
cttcaaagcagtcagcaaggtggcaagttgcaaaagagctttatcaaactgaaagtaattatgttaatatattggcaacaattattcagttatttcaagtaccattggaagaggaaggacaacgtggtggacctatccttgcaccagaggagattaagactatttttggtagcatcccagatatctttgatgtacacactaagataaaggatgatcttgaagaccttatagttaattgggatgagagcaaaagcattggtgacatttttctgaaatattcaaaagatttggtaaaaacctaccctccctttgtaaacttctttgaaatgagcaaggaaacaattattaaatgtgaaaaacagaaaccaagatttcatgcttttctcaagataaaccaagcaaaaccagaatgtggacggcagagccttgttgaacttcttatccgaccagtacagaggttacccagtgttgcattacttttaaatgatcttaagaagcatacagctgatgaaaatccagacaaaagcactttagaaaaagctattggatcactgaaggaagtaatgacgcatattaatgaggataagagaaaaacagaagctcaaaagcaaatttttgatgttgtttatgaagtagatggatgcccagctaatcttttatcttctcaccgaagcttagtacagcgggttgaaacaatttctctaggtgagcacccctgtgacagaggagaacaagtaactctcttcctcttcaatgattgcctagagatagcaagaaaacggcacaaggttattggcacttttaggagtcctcatggccaaacccgacccccagcttctcttaagcatattcacctaatgcctctttctcagattaagaaggtattggacataagagagacagaagattgccataatgcttttgccttgcttgtgaggccaccaacagagcaggcaaatgtgctactcagtttccagatgacatcagatgaacttccaaaagaaaactggctaaagatgctgtgtcgacatgtagctaacaccatttgtaaagcagatgctgagaatcttatttatactgctgatccagaatcctttgaagtaaatacaaaagatatggacagtacattgagtagagcatcaagagcaataaaaaagacttcaaaaaaggttacaagagcattctctttctccaaaactccaaaaagagctcttcgaagggctcttatgacatcccacggctcagtggagggaagaagtccttccagcaatgataagcatgtaatgagtcgtctttctagcacatcatcattagcaggtatcccttctccctcccttgtcagccttccttccttctttgaaaggagaagtcatacgttaagtagatctacaactcatttgatatgaagcgttaccaaaatcttaaattatagaaatgtatagacacctcatactcaaataagaaactgacttaaatggtacttgtaattagcacttggtgaaagctggaaggaagataaataacactaaactatgctatttgatttttcttcttgaaagagtaaggtttacctgttacattttcaagttaattcatgtaaaaaatgatagtgattttgatgtaatttatctcttgtttgaatctgtcattcaaaggccaataatttaagttgctatcagctgatattagtagctttgcaaccctgatagagtaaataaattttatgggcgggtgccaaatactgctgtgaatctatttgtatagtatccatgaatgaatttatggaaatagatatttgtgcagctcaatttatgcagagattaaatgacatcataatactggatgaaaacttgcatagaattctgattaaatagtgggtctgtttcacatgtgcagtttgaagtatttaaataaccactcctttcacagtttattttcttctcaagcgttttcaagatctagcatgtggattttaaaagatttgccctcattaacaagaataacatttaaaggagattgtttcaaaatatttttgcaaattgagataaggacagaaagattgagaaacattgtatattttgcaaaaacaagatgtttgtagctgtttcagagagagtacggtatatttatggtaattttatccactagcaaatcttgatttagtttgatagtgtgtggaattttattttgaaggataagaccatgggaaaattgtggtaaagactgtttgtacccttcatgaaataattctgaagttgccatcagttttactaatcttctgtgaaatgcatagatatgcgcatgttcaactttttattgtggtcttataattaaatgtaaaattgaaaattcatttgctgtttcaaagtgtgatatctttcacaatagcctttttatagtcagtaattcagaataatcaagttcatatggataaatgcatttttatttcctatttctttagggagtgctacaaatgtttgtcacttaaatttcaagtttctgttttaatagttaactgactatagattgttttctatgccatgtatgtgccacttctgagagtagtaaatgactctttgctacattttaaaagcaattgtattagtaagaactttgtaaataaatacctaaaaccc

SEQ ID NO: 138 - protein, 359 aa, Homo sapiens
MSKETIIKCEKQKPRFHAFLKINQAKPECGRQSLVELLIRPVQRLPSVALLLNDLKKHTADENPDKSTLEKAIGSLKEVMTHINEDKRKTEAQKQIFDVVYEVDGCPANLLSSHRSLVQRVETISLGEHPCDRGEQVTLFLFNDCLEIARKRHKVIGTFRSPHGQTRPPASLKHIHLMPLSQIKKVLDIRETEDCHNAFALLVRPPTEQANVLLSFQMTSDELPKENWLKMLCRHVANTICKADAENLIYTADPESFEVNTKDMDSTLSRASRAIKKTSKKVTRAFSFSKTPKRALRRALMTSHGSVEGRSPSSNDKHVMSRLSSTSSLAGIPSPSLVSLPSFFERRSHTLSRSTTHLI

SEQ ID NO: 139 - DNA, 3910 bp, Homo sapiens
  CDS (29)..(2677)
agagtgctgatttagaagaatacaaatcatggctgaaaatagtgtattaacatccactactgggaggactagcttggcagactcttccatttttgattctaaagttactgagatttccaaggaaaacttacttattggatctacttcatatgtagaagaagagatgcctcagattgaaacaagagtgatattggttcaagaagctggaaaacaagaagaacttacaaaagccttaaaggacattaaagtgggctttgtaaagatggagtcagtggaagaatttgaaggtttggattctccggaatttgaaaatgtatttgtagtcacggactttcaggattctgtctttaatgacctctacaaggctgattgtagagttattggaccaccagttgtattaaattgttcacaaaaaggagagcctttgccattttcatgtcgcccgttgtattgtacaagtatgatgaatctagtactatgctttactggatttaggaaaaaagaagaactagtcaggttggtgacattggtccatcacatgggtggagttattcgaaaagactttaattcaaaagttacacatttggtggcaaattgtacacaaggagaaaaattcagggttgctgtgagtctaggtactccaattatgaagccagaatggatttataaagcttgggaaaggcggaatgaacaggatttctatgcagcagttgatgactttagaaatgaatttaaagttcctccatttcaagattgtatttttagtttcctgggattttcagatgaagagaaaaccaatatggaagaaatgactgaaatgcaaggaggtaaatatttaccgcttggagatgaaagatgcactcaccttgtagttgaagagaatatagtaaaagatcttccctttgaaccttcaaagaaactttatgttgtcaagcaagagtggttctggggaagcattcaaatggatgcccgagctggagaaactatgtatttatatgaaaaggcaaatactcctgagctcaagaaatcagtgtcaatgctttctctaaatacccctaacagcaatcgcaaacgacgtcgtttaaaagaaacacttgctcagctttcaagagatacagacgtgtcaccatttccaccccgtaagcgcccatcagctgagcattccctttccatagggtcactcctagatatctccaacacaccagagtctagcattaactatggagacaccccaaagtcttgtactaagtcttctaaaagctccactccagttccttcaaagcagtcagcaaggtggcaagttgcaaaagagctttatcaaactgaaagtaattatgttaatatattggcaacaattattcagttatttcaagtaccattggaagaggaaggacaacgtggtggacctatccttgcaccagaggagattaagactatttttggtagcatcccagatatctttgatgtacacactaagataaaggatgatcttgaagaccttatagttaattgggatgagagcaaaagcattggtgacatttttctgaaatattcaaaagatttggtaaaaacctaccctccctttgtaaacttctttgaaatgagcaaggaaacaattattaaatgtgaaaaacagaaaccaagatttcatgcttttctcaagataaaccaagcaaaaccagaatgtggacggcagagccttgttgaacttcttatccgaccagtacagaggttacccagtgttgcattacttttaaatgatcttaagaagcatacagctgatgaaaatccagacaaaagcactttagaaaaagctattggatcactgaaggaagtaatgacgcatattaatgaggataagagaaaaacagaagctcaaaagcaaatttttgatgttgtttatgaagtagatggatgcccagctaatcttttatcttctcaccgaagcttagtacagcgggttgaaacaatttctctaggtgagcacccctgtgacagaggagaacaagtaactctcttcctcttcaatgattgcctagagatagcaagaaaacggcacaaggttattggcacttttaggagtcctcatggccaaacccgacccccagcttctcttaagcatattcacctaatgcctctttctcagattaagaaggtattggacataagagagacagaagattgccataatgcttttgccttgcttgtgaggccaccaacagagcaggcaaatgtgctactcagtttccagatgacatcagatgaacttccaaaagaaaactggctaaagatgctgtgtcgacatgtagctaacaccatttgtaaagcagatgctgagaatcttatttatactgctgatccagaatcctttgaagtaaatacaaaagatatggacagtacattgagtagagcatcaagagcaataaaaaagacttcaaaaaaggttacaagagcattctctttctccaaaactccaaaaagagctcttcgaagggctcttatgacatcccacggctcagtggagggaagaagtccttccagcaatgataagcatgtaatgagtcgtctttctagcacatcatcattagcaggtatcccttctccctcccttgtcagccttccttccttctttgaaaggagaagtcatacgttaagtagatctacaactcatttgatatgaagcgttaccaaaatcttaaattatagaaatgtatagacacctcatactcaaataagaaactgacttaaatggtacttgtaattagcacttggtgaaagctggaaggaagataaataacactaaactatgctatttgatttttcttcttgaaagagtaaggtttacctgttacattttcaagttaattcatgtaaaaaatgatagtgattttgatgtaatttatctcttgtttgaatctgtcattcaaaggccaataatttaagttgctatcagctgatattagtagctttgcaaccctgatagagtaaataaattttatgggcgggtgccaaatactgctgtgaatctatttgtatagtatccatgaatgaatttatggaaatagatatttgtgcagctcaatttatgcagagattaaatgacatcataatactggatgaaaacttgcatagaattctgattaaatagtgggtctgtttcacatgtgcagtttgaagtatttaaataaccactcctttcacagtttattttcttctcaagcgttttcaagatctagcatgtggattttaaaagatttgccctcattaacaagaataacatttaaaggagattgtttcaaaatatttttgcaaattgagataaggacagaaagattgagaaacattgtatattttgcaaaaacaagatgtttgtagctgtttcagagagagtacggtatatttatggtaattttatccactagcaaatcttgatttagtttgatagtgtgtggaattttattttgaaggataagaccatgggaaaattgtggtaaagactgtttgtacccttcatgaaataattctgaagttgccatcagttttactaatcttctgtgaaatgcatagatatgcgcatgttcaactttttattgtggtcttataattaaatgtaaaattgaaaattcatttgctgtttcaaagtgtgatatctttcacaatagcctttttatagtcagtaattcagaataatcaagttcatatggataaatgcatttttatttcctatttctttagggagtgctacaaatgtttgtcacttaaatttcaagtttctgttttaatagttaactgactatagattgttttctatgccatgtatgtgccacttctgagagtagtaaatgactctttgctacattttaaaagcaattgtattagtaagaactttgtaaataaatacctaaaaccc

SEQ ID NO: 140 - protein, 883 aa, Homo sapiens
MAENSVLTSTTGRTSLADSSIFDSKVTEISKENLLIGSTSYVEEEMPQIETRVILVQEAGKQEELTKALKDIKVGFVKMESVEEFEGLDSPEFENVFVVTDFQDSVFNDLYKADCRVIGPPVVLNCSQKGEPLPFSCRPLYCTSMMNLVLCFTGFRKKEELVRLVTLVHHMGGVIRKDFNSKVTHLVANCTQGEKFRVAVSLGTPIMKPEWIYKAWERRNEQDFYAAVDDFRNEFKVPPFQDCIFSFLGFSDEEKTNMEEMTEMQGGKYLPLGDERCTHLVVEENIVKDLPFEPSKKLYVVKQEWFWGSIQMDARAGETMYLYEKANTPELKKSVSMLSLNTPNSNRKRRRLKETLAQLSRDTDVSPFPPRKRPSAEHSLSIGSLLDISNTPESSINYGDTPKSCTKSSKSSTPVPSKQSARWQVAKELYQTESNYVNILATIIQLFQVPLEEEGQRGGPILAPEEIKTIFGSIPDIFDVHTKIKDDLEDLIVNWDESKSIGDIFLKYSKDLVKTYPPFVNFFEMSKETIIKCEKQKPRFHAFLKINQAKPECGRQSLVELLIRPVQRLPSVALLLNDLKKHTADENPDKSTLEKAIGSLKEVMTHINEDKRKTEAQKQIFDVVYEVDGCPANLLSSHRSLVQRVETISLGEHPCDRGEQVTLFLFNDCLEIARKRHKVIGTFRSPHGQTRPPASLKHIHLMPLSQIKKVLDIRETEDCHNAFALLVRPPTEQANVLLSFQMTSDELPKENWLKMLCRHVANTICKADAENLIYTADPESFEVNTKDMDSTLSRASRAIKKTSKKVTRAFSFSKTPKRALRRALMTSHGSVEGRSPSSNDKHVMSRLSSTSSLAGIPSPSLVSLPSFFERRSHTLSRSTTHLI

SEQ ID NO: 141 - DNA, 2241 bp, Homo sapiens
  CDS (15)..(1835)
gatcggcggccgccatgttaggagcgcagtggcggcgcaaccagccttctagggcggcggaggagtggagtcaacatatcaatggagcaagtcacagtcgtcgatgccagcttcttcttgaaatctacccagaatggaatcctgacaatgatacaggacacacaatgggtgatccattcatgttgcagcagtctacaaatccagcaccaggaattctgggacctccacctccctcatttcatcttgggggaccagcagttggaccaagaggaaatctgggtgctggaaatggaaacctgcaaggacctagacacatgcagaaaggcagagtggaaactagcagagttgttcacatcatggattttcaacgagggaaaaacttgagataccagctattacagctggtagaaccatttggagtcatttcaaatcatctgattctaaataaaattaatgaggcatttattgaaatggcaaccacagaggatgctcaggccgcagtggattattacacaaccacaccagcgttagtatttggcaagccagtgagagttcatttatcccagaagtataaaagaataaagaaacctgaaggaaagccagatcagaagtttgatcaaaagcaagagcttggacgtgtgatacatctcagcaatttgccgcattctggctattctgatagtgctgttctcaagcttgctgagccttatgggaaaataaagaattacatattgatgaggatgaaaagtcaggcttttattgagatggagacaagagaagatgcaatggcaatggttgaccattgtttgaaaaaagccctttggtttcaggggagatgtgtgaaggttgacctgtctgagaaatataaaaaactggttctgaggattccaaacagaggcattgatttactgaaaaaagataaatcccgaaaaagatcttactctccagatggcaaagaatctccaagtgataagaaatccaaaactgatggttcccagaagactgagagttcaaccgaaggtaaagaacaagaagagaagtccggtgaagatggtgagaaagacacaaaggatgaccagacagagcaggaacctaatatgcttcttgaatctgaagatgagctacttgtagatgaagaagaagcagcagcactgctagaaagtggcagttcagtgggagacgagaccgatcttgctaatttaggtgatgtggcttctgatgggaaaaaggaaccatcagataaagctgtgaaaaaagatggaagtgcttcagcagcagcaaagaaaaagcttaaaaagcgtcgttttccagggagtatggaaggttttgtcactctagatgaggttggtgatgaggaagattcggaacttcagaaacttcgtaaatcgggcatggcatttaaatctggtgacaaaaatgatgatggtttggttgaaattaaggtggacaagatcgaggaacttgatcaagaaaacgaagcagcgttggaaaatggaattaaaaatgaggaaaacacagaaccaggtgctgaatcttctgagaacgctgatgatcccaacaaagatacaagtgaaaacgcagatggtcaaagtgatgagaacaaggacgactatacaatcccagatgagtatagaattggaccatatcagcccaatgttcctgttggtatagactatgtgatacctaaaacagggttttactgtaagctgtgttcactcttttatacaaatgaagaagttgcaaagaatactcattgcagcagccttcctcattatcagaaattaaagaaatttctgaataaattggcagaagaacgcagacagaagaaggaaacttaagatgtgcaaggagatttaatgatttcaaagaaaataatggttctttgtttttaatgttaaccttttttaaatacaatactgatagttagaagaaaactattgtactcttttgttttagtggagaaataatagatgtctgttcatgtgttaagtgttatagcaaaaaaaatacacatatggttaagttaatgaatagtttttgttttatcagaatggcaacagacagaagtactttgtagagattgacttcctaagctacttaagacaacttgcaccactaagaaaaaaatgtagaaccatttggaaaaatgaaatttagtagttccaagtttcaaagaaatgtcaacattttattccattcaataaagaacaaaaccaatagtgtttttattactttcatctg

SEQ ID NO: 142 - protein, 607 aa, Homo sapiens
MLGAQWRRNQPSRAAEEWSQHINGASHSRRCQLLLEIYPEWNPDNDTGHTMGDPFMLQQSTNPAPGILGPPPPSFHLGGPAVGPRGNLGAGNGNLQGPRHMQKGRVETSRVVHIMDFQRGKNLRYQLLQLVEPFGVISNHLILNKINEAFIEMATTEDAQAAVDYYTTTPALVFGKPVRVHLSQKYKRIKKPEGKPDQKFDQKQELGRVIHLSNLPHSGYSDSAVLKLAEPYGKIKNYILMRMKSQAFIEMETREDAMAMVDHCLKKALWFQGRCVKVDLSEKYKKLVLRIPNRGIDLLKKDKSRKRSYSPDGKESPSDKKSKTDGSQKTESSTEGKEQEEKSGEDGEKDTKDDQTEQEPNMLLESEDELLVDEEEAAALLESGSSVGDETDLANLGDVASDGKKEPSDKAVKKDGSASAAAKKKLKKRRFPGSMEGFVTLDEVGDEEDSELQKLRKSGMAFKSGDKNDDGLVEIKVDKIEELDQENEAALENGIKNEENTEPGAESSENADDPNKDTSENADGQSDENKDDYTIPDEYRIGPYQPNVPVGIDYVIPKTGFYCKLCSLFYTNEEVAKNTHCSSLPHYQKLKKFLNKLAEERRQKKET

SEQ ID NO: 143 - DNA, 3815 bp, Homo sapiens
  CDS (255)..(2798)
gcataagtttttttttcttaaaaaaacggcatctgcttaaagggatttatgactaaaattgcttatttttctacagagttgtctgctggttctcagcttgaagaagattctgaagtccttattgatcctttttcttggcgttaccattttttgaagcaaagttaacctagctttctagtttgagctttctttttggccgtctttaaaaaaaattttttttttaatctataaaatagacaagagctagttctacaatgtccaagtcattccagcagtcatctctcagtagggactcacagggtcatgggcgtgacctgtctgcggcaggaataggccttcttgctgctgctacccagtctttaagtatgccagcatctcttggaaggatgaaccagggtactgcacgccttgctagtttaatgaatcttggaatgagttcttcattgaatcaacaaggagctcatagtgcactgtcttctgctagtacttcttcccataatttgcagtctatatttaacattggaagtagaggtccactccctttatcttctcaacaccgtggagatgcagaccaggccagtaacattttggccagctttggtctgtctgctagagacttagatgaactgagtcgttatccagaggacaagattactcctgagaatttgccccaaatccttctacagcttaaaaggaggagaactgaagaaggccctaccttgagttatggtagagatggcagatctgctacacgggagccaccatacagagtacctagggatgattgggaagaaaaaaggcactttagaagagatagttttgatgatcgtggtcctagtctcaacccagtgcttgattatgaccatggaagtcgttctcaagaatctggttattatgacagaatggattatgaagatgacagattaagagatggagaaaggtgtagggatgattctttttttggtgagacctcgcataactatcataaatttgacagtgagtatgagagaatgggacgtggttctggccccttacaagagagatctctctttgagaaaaagagaggcgctccttcaagtagcaatattgtagacgttcattggactcttaccgaaagggttatccccatctgtgctctatatgtgattggccaggtcattctaataaggagtggagtcaacatatcaatggagcaagtcacagtcgtcgatgccagcttcttcttgaaatctacccagaatggaatcctgacaatgatacaggacacacaatgggtgatccattcatgttgcagcagtctacaaatccagcaccaggaattctgggacctccacctccctcatttcatcttgggggaccagcagttggaccagaggaatctgggtgctggaaatggaacctgcaaggacctagacacatgcagaaaggcagagtggaaacttagcagagttgttcacatcatgggtttttcaacggaggaaaaaactttgagataccagctattacagctggtagaaccatttggagtcatttcaaatcatctgattctaaataaaattaatgaggcatttattgaaatggcaaccacagaggatgctcaggccgcagtggattattacacaaccacaccagcgttagtatttggcaagccagtgagagttcatttatcccagaagtataaaagaataaagaaacctgaaggaaagccagatcagaagtttgatcaaaagcaagagcttggacgtgtgatacatctcagcaatttgccgcattctggctattctgatagtgctgttctcaagcttgctgagccttatgggaaaataaagaattacatattgatgaggatgaaaagtcaggcttttattgagatggagacaagagaagatgcaatggcaatggttgaccattgtttgaaaaaagccctttggtttcaggggagatgtgtgaaggttgacctgtctgagaaatgtaaaaaactggttctgaggattccaaacagaggcattgatttactgaaaaaagataaatcccgaaaaagatcttactctccagatggcaaagaatctccaagtgataagaaatccaaaactgatggttcccagaagactgagagttcaaccgaaggtaaagaacaagaagagaagtccggtgaagatggtgagaaagacacaaaggatgaccagacagagcaggaacctaatatgcttcttgaatctgaagatgagctacttgtagatgaagaagaagcagcagcactgctagaaagtggcagttcagtgggagacgagaccgatcttgctaatttaggtgatgtggcttctgatgggaaaaaggaaccatcagataaagctgtgaaaaaagatggaagtgcttcagcagcagcaaagaaaaagcttaaaaaggtggacaagatcgaggaacttgatcaagaaaacgaagcagcgttggaaaatggaattaaaaatgaggaaaacacagaaccaggtgctgaatcttctgagaacgctgatgatcccaacaaagatacaagtgaaaacgcagatggtcaaagtgatgagaacaaggacgactatacaatcccagatgagtatagaattggaccatatcagcccaatgttcctgttggtatagactatgtgatacctaaaacagggttttactgtaagctgtgttcactcttttatacaaatgaagaagttgcaaagaatactcattgcagcagccttcctcattatcagaaattaaagaaatttctgaataaattggcagaagaacgcagacagaagaaggaaacttaagatgtgcaaggagatttaatgatttcaaagaaaataatggttctttgtttttaatgttaaccttttttaaatacaatactgatagttagaagaaaactattgtactcttttgttttagtggagaaataatagatgtctgttcatgtgttaagtgttatagcaaaaaaaatacacatatggttaagttaatgaatagtttttgttttatcagaatggcaacagacagaagtactttgtagagattgacttcctaagctacttaagacaacttgcaccactaagaaaaaaatgtagaaccatttggaaaaatgaaatttagtagttccaagtttcaaagaaatgtcaacattttattccattcaataaagaacaaaaccaatagtgtttttattactttcatctgaaacattccatgttttaatctgagccttgcagactttcatttggagtttgaacccgttttggttgcatttcatttttggagaacttaattaacgtgagattggcaattgaaatgcaggtgcagttttctgttaatgtcatgctgttgtttaggtaataagaaatattaagtaattggctttagattttgtaatttttttccctgagttcctgctagatttcgtattctagtagtcaatgtattttcagtgaaatgcaaaaatattcccattatctttgaccagtattaatttttgagatcttactgcttgtcacttgaatcccgtgattgtcatacatctctggtataagcaacatttgatttttgaagtgtgtagaccatctcttcatattttcaagatgtaattttacatttctgcatttttaaaacagtttggccataatcctagatgcacgcttctaattcatgtacctgcacatgtgacctttgtgaacagaaatttgcatgtataatttgtgtttacttgtaactttctggttatatactgcttatatctgtggattcaagttactgaagtgaataccaataaaaagaaaaccctaggccatgtt

SEQ ID NO: 144 - protein, 848 aa, Homo sapiens
MSKSFQQSSLSRDSQGHGRDLSAAGIGLLAAATQSLSMPASLGRMNQGTARLASLMNLGMSSSLNQQGAHSALSSASTSSHNLQSIFNIGSRGPLPLSSQHRGDADQASNILASFGLSARDLDELSRYPEDKITPENLPQILLQLKRRRTEEGPTLSYGRDGRSATREPPYRVPRDDWEEKRHFRRDSFDDRGPSLNPVLDYDHGSRSQESGYYDRMDYEDDRLRDGERCRDDSFFGETSHNYHKFDSEYERMGRGSGPLQERSLFEKKRGAPSSSNIVDVHWTLTERVIPICALYVIGQVILIRSGVNISMEQVTVVDASFFLKSTQNGILTMIQDTQWVIHSCCSSLQIQHQEFWDLHLPHFILGDQQLDQRNLGAGNGTCKDLDTCRKAEWKLSRVVHIMGFSTEEKTLRYQLLQLVEPFGVISNHLILNKINEAFIEMATTEDAQAAVDYYTTTPALVFGKPVRVHLSQKYKRIKKPEGKPDQKFDQKQELGRVIHLSNLPHSGYSDSAVLKLAEPYGKIKNYILMRMKSQAFIEMETREDAMAMVDHCLKKALWFQGRCVKVDLSEKCKKLVLRIPNRGIDLLKKDKSRKRSYSPDGKESPSDKKSKTDGSQKTESSTEGKEQEEKSGEDGEKDTKDDQTEQEPNMLLESEDELLVDEEEAAALLESGSSVGDETDLANLGDVASDGKKEPSDKAVKKDGSASAAAKKKLKKVDKIEELDQENEAALENGIKNEENTEPGAESSENADDPNKDTSENADGQSDENKDDYTIPDEYRIGPYQPNVPVGIDYVIPKTGFYCKLCSLFYTNEEVAKNTHCSSLPHYQKLKKFLNKLAEERRQKKET

SEQ ID NO: 145 - DNA, 1829 bp, Homo sapiens
  CDS (124)..(408)
aaccgtgatcagattaagaactgtggatttttttatggccacagtgcattttcagtagcccttatttttgtaactgcattccagggcctttcagtggctttcattctgaagttcctggataacatgttccatgtcttgatggcccaggttaccactgtcattatcacaacagtgtctgtcctggtctttgacttcaggccctccctggaatttttcttggaagccccatcagtccttctctctatatttatttataatgccagcaagcctcaagttccggaatacgcacctaggcaagaaaggatccgagatctaagtggcaatctttgggagcgttccagtggggatggagaagaactagaaagacttaccaaacccaagagtgatgagtcagatgaagatactttctaactggtacccacatagtttgcagctctcttgaaccttattttcacattttcagtgtttgtaatatttatcttttcactttgataaaccagaaatgtttctaaatcctaatattctttgcatatatctagctactccctaaatggttccatccaaggcttagagtacccaaaggctaagaaattctaaagaactgatacaggagtaacaatatgaagaattcattaatatctcagtacttgataaatcagaaagttatatgtgcagattattttccttggccttcaagcttccaaaaaacttgtaataatcatgttagctatagcttgtatatacacatagagatcaatttgccaaatattcacaatcatgtagttctagtttacatgccaaagtcttccctttttaacattataaaagctaggttgtctcttgaattttgaggccctagagatagtcattttgcaagtaaagagcaacgggaccctttctaaaaacgttggttgaaggacctaaatacctggccataccatagatttgggatgatgtagtctgtgctaaatattttgctgaagaagcagtttctcagacacaacatctcagaattttaatttttagaaattcatgggaaattggatttttgtaataatcttttgatgttttaaacattggttccctagtcaccatagttaccacttgtattttaagtcatttaaacaagccacggtggggcttttttctcctcagtttgaggagaaaaatcttgatgtcattactcctgaattattacattttggagaataagagggcattttattttattagttactaattcaagctgtgactattgtatatctttccaagagttgaaatgctggcttcagaatcataccagattgtcagtgaagctgatgcctaggaacttttaaagggatcctttcaaaaggatcacttagcaaacacatgttgacttttaactgatgtatgaatattaatactctaaaaatagaaagaccagtaatatataagtcactttacagtgctacttcacacttaaaagtgcatggtatttttcatggtattttgcatgcagccagttaactctcgtagatagagaagtcaggtgatagatgatattaaaaattagcaaacaaaagtgacttgctcagggtcatgcagctgggtgatgatagaagagtgggctttaactggcaggcctgtatgtttacagactaccatactgtaaatatgagctttatggtgtcattctcagaaacttatacatttctgctctcctttctcctaagtttcatgcagatgaatataaggtaatatactattatataattcatttgtgatatccacaataatatgactggcaagaattggtggaaatttgtaattaaaataattattaaacc

SEQ ID NO: 146 - protein, 95 aa, Homo sapiens [sequence omitted]

SEQ ID NO: 147 - DNA, 2879 bp, Homo sapiens
  CDS (187)..(1458)
tttttgttctgcaataggcggcttagagggaggggctttttcgcctatacctactgtagcttctccacgtatggaccctaaaggctactgctgctactacggggctagacagttactgtctcagctctaggatgtgcgttcttccactagaagctcttctgagggaggtaattaaaaaacggtggaatggaaaaacagtgctgtagtcatcctgtaatatgctccttgtcaacaatgtatacattcctgctaggtgccatattcattgctttaagctcaagtcgcatcttactagtgaagtattctgccaatgaagaaaacaagtatgattatcttccaactactgtgaatgtgtgctcagaactggtgaagctagttttctgtgtgcttgtgtcattctgtgttataaagaaagatcatcaaagtagaaatttgaaatatgcttcctggaaggaattctctgatttcatgaagtggtccattcctgcctttctttatttcctggataacttgattgtcttctatgtcctgtcctatcttcaaccagccatggctgttatcttctcaaattttagcattataacaacagctcttctattcaggatagtgctgaagaggcgtctaaactggatccagtgggcttccctcctgactttatttttgtctattgtggccttgactgccgggactaaaactttacagcacaacttggcaggacgtggatttcatcacgatgcctttttcagcccttccaattcctgccttcttttcagaagtgagtgtcccagaaaagacaattgtacagcaaaggaatggacttttcctgaagctaaatggaacaccacagccagagttttcagtcacatccgtcttggcatgggccatgttcttattatagtccagtgttttatttcttcaatggctaatatctataatgaaaagatactgaaggaagggaaccagctcactgaaagcatcttcatacagaacagcaaactctatttctttggcattctgtttaatgggctgactctgggccttcagaggagtaaccgtgatcagattaagaactgtggatttttttatggccacagtgcattttcagtagcccttatttttgtaactgcattccagggcctttcagtggctttcattctgaagttcctggataacatgttccatgtcttgatggcccaggttaccactgtcattatcacaacagtgtctgtcctggtctttgacttcaggccctccctggaatttttcttggaagccccatcagtccttctctctatatttatttataatgccagcaagcctcaagttccggaatacgcacctaggcaagaaaggatccgagatctaagtggcaatctttgggagcgttccagtggggatggagaagaactagaaagacttaccaaacccaagagtgatgagtcagatgaagatactttctaactggtacccacatagtttgcagctctcttgaaccttattttcacattttcagtgtttgtaatatttatcttttcactttgataaaccagaaatgtttctaaatcctaatattctttgcatatatctagctactccctaaatggttccatccaaggcttagagtacccaaaggctaagaaattctaaagaactgatacaggagtaacaatatgaagaattcattaatatctcagtacttgataaatcagaaagttatatgtgcagattattttccttggccttcaagcttccaaaaaacttgtaataatcatgttagctatagcttgtatatacacatagagatcaatttgccaaatattcacaatcatgtagttctagtttacatgccaaagtcttccctttttaacattataaaagctaggttgtctcttgaattttgaggccctagagatagtcattttgcaagtaaagagcaacgggaccctttctaaaaacgttggttgaaggacctaaatacctggccataccatagatttgggatgatgtagtctgtgctaaatattttgctgaagaagcagtttctcagacacaacatctcagaattttaatttttagaaattcatgggaaattggatttttgtaataatcttttgatgttttaaacattggttccctagtcaccatagttaccacttgtattttaagtcatttaaacaagccacggtggggcttttttctcctcagtttgaggagaaaaatcttgatgtcattactcctgaattattacattttggagaataagagggcattttattttattagttactaattcaagctgtgactattgtatatctttccaagagttgaaatgctggcttcagaatcataccagattgtcagtgaagctgatgcctaggaacttttaaagggatcctttcaaaaggatcacttagcaaacacatgttgacttttaactgatgtatgaatattaatactctaaaaatagaaagaccagtaatatataagtcactttacagtgctacttcacacttaaaagtgcatggtatttttcatggtattttgcatgcagccagttaactctcgtagatagagaagtcaggtgatagatgatattaaaaattagcaaacaaaagtgacttgctcagggtcatgcagctgggtgatgatagaagagtgggctttaactggcaggcctgtatgtttacagactaccatactgtaaatatgagctttatggtgtcattctcagaaacttatacatttctgctctcctttctcctaagtttcatgcagatgaatataaggtaatatactattatataattcatttgtgatatccacaataatatgactggcaagaattggtggaaatttgtaattaaaataattattaaacc

SEQ ID NO: 148 - protein, 424 aa, Homo sapiens
MEKQCCSHPVICSLSTMYTFLLGAIFIALSSSRILLVKYSANEENKYDYLPTTVNVCSELVKLVFCVLVSFCVIKKDHQSRNLKYASWKEFSDFMKWSIPAFLYFLDNLIVFYVLSYLQPAMAVIFSNFSIITTALLFRIVLKRRLNWIQWASLLTLFLSIVALTAGTKTLQHNLAGRGFHHDAFFSPSNSCLLFRSECPRKDNCTAKEWTFPEAKWNTTARVFSHIRLGMGHVLIIVQCFISSMANIYNEKILKEGNQLTESIFIQNSKLYFFGILFNGLTLGLQRSNRDQIKNCGFFYGHSAFSVALIFVTAFQGLSVAFILKFLDNMFHVLMAQVTTVIITTVSVLVFDFRPSLEFFLEAPSVLLSIFIYNASKPQVPEYAPRQERIRDLSGNLWERSSGDGEELERLTKPKSDESDEDTF

SEQ ID NO: 149 - DNA, 1613 bp, Homo sapiens
  CDS (12)..(464)
atggttccatcatggcgtcaatgcagaaacgactacagaaagaactgttggctttgcaaaatgacccacctcctggaatgaccttaaatgagaagagtgttcaaaattcaattacacagtggattgtagacatggaaggtgcaccaggtaccttatatgaaggggaaaaatttcaacttctatttaaatttagtagtcgatatccttttgactctcctcaggtcatgtttactggtgaaaatattcctgttcatcctcatgtttatagcaatggtcatatctgtttatccattctaacagaagactggtccccagcgctctcagtccaatcagtttgtcttagcattattagcatgctttccagctgcaaggaaaagagacgaccaccggataattctttttatgtgcgaacatgtaacaagaatccaaagaaaacaaaatggtggtatcatgatgatacttgttgatgccactgttatcatcctcctagcagaagatagtcctactgagaaaatgagcactttgatcattcagtctttgaactttaacctttgactggaagtgacctataggcaatgaagactacttccttttactgcatttttactcgtgtgcattctgggcgcatgttgatcgctggttcagtccaggcaactgacatgcttttattagtcatacagtattaatgcaggtgtcaggaaatgtcaaatataattccattttttatttttatttttttaagcttttggaaaagctccaggtcctcatgtattgtgcaataacaatgacttccttggcggttttggtacgttcattgccggcaatgggcgttgtaacaggaaaagttttcattaactcctgccattcaatgattaatgcatgatagggcctatgaaatgaacttactggttatagtgggaatataaataaagtgagggatccaacattactttaaaagtcaccccaactgtttatatttggattctatgcactgtgatcctaaggttaacagcatgaattaacatgcgtctttaaaggactgtaatgaaagatcattgcatatttattgaattgtttatatctactgtcaagttgttttgacatggaagattttcaagtaacattggcagagaggtacagtatgttatccctatggtgaaaataaattaatttgttgtatatagttcctcaatctctgaagtaaaggtatgagtaatatagggtatgaatggtttaatcaaggctttattttggaagtaagaaaaatggcagtgatgattaaattgctgcagtccataatttgggcttgttatttgtacattaaagattttttccaagtaagttacactctgttaacttcctgctagccatcagcatgagccctactgcctaaacactatttcatttatttatgtttggaaaccccgtaaacatttttgtttgcaatcttgtttcttttgttataagtcaagtttgaatgttacaatacttttattgaaacttttgttaagttttttcttgtaaattttctttacttgtgagtatcatcttgtcctttaatcctgtaccctaaaataagaaatacatttttgacagaggcttaatgttttaac

SEQ ID NO: 150 - protein, 151 aa, Homo sapiens
MASMQKRLQKELLALQNDPPPGMTLNEKSVQNSITQWIVDMEGAPGTLYEGEKFQLLFKFSSRYPFDSPQVMFTGENIPVHPHVYSNGHICLSILTEDWSPALSVQSVCLSIISMLSSCKEKRRPPDNSFYVRTCNKNPKKTKWWYHDDTC

SEQ ID NO: 151 - DNA, 1639 bp, Homo sapiens
  CDS (315)..(488)
gcacccagcttatcttgcaagtgatgaaataaccacagtccggaagaaccttgaatcccgaggagtagaagtagatccaagcttgattaaggatacttggcatcaagtttatagaagacattttttaaaaacagctctaaaccattgtaacctttgtcgaagaggtttttattactaccaaaggcattttgtagattctgagttggaatgcaatgatgtggtcttgttttggcgtatacagcgcatgcttgctatcaccgcaaatactttaaggcaacaacttacaaatactgaagttaggcgattagagaaaaatgttaaagaggtattggaagattttgctgaagatggtgagaagaagattaaattgcttactggtaaacgcgttcaactggcggaagacctcaagaaagttagagaaattcaagaaaaacttgatgctttcattgaagctcttcatcaggagaaataaattaaaatcgtactcataatcagctctgcatacatctgaagaacaaaaacatcaacgtcttttgtccagcctctttttcttctgctgttccacctttctaaacatacaataaagtcatgggataaaaataatcgatgtatgttacgggcgctttaaccatcagctgcctctcgaatggaagaacagtggtaatggattaacatcctattttgttgtactaaagtgacaaatcggaataatataattggtatggccattaggttcagtccttgaagataagaaacttgttctctgtttgttgtcttatttgtggtggcactcgtttaatggattaactgaggttgctcaatgttcagtttcttttccagaaatacaatgctaggtgttttgaaataaaacttatatagcaattgtttaaagttatcaattgtatataaaatcacagtagcctgctaaatcattgtatgtgtctgtagtattctattcccagaaactatttgaccatgataattcagtttatattcaccacatgaaagaaaaatgggtaacagaagaacccctaaaacaggttaatttggattgtaacgttcagtgaaagaaatttcaacccttcatagccagcgaagaaatttgccttggaagccaagtcagtaccagcttacctatttgattcagttgctgttttctcactctctatatccatttgaaattgatttattttagatgttgtatacttacgttaggctttctgttaatagtggtttttctcctgttgacagaaccaccggattatgacacaggatgaggaagattaaggataatcaattgactaatttcatttagaatattatcaaacatttcaactaggtatcagaaaaaggctttctttcataagactattttaaatagaaattatttcaacaattaaagtaatgttgaccatccccctctcagctgaataaagaaaaatttagttcaatttattgcaatttaattacaatactaccttcacaacattttcatgtgttttaaataaatattttttaattggctaaaggacattcaagcaaagaaatgctttctttacttaaaatgtctatctcatttgctgccttttcactaagcctttactttgttaataaaagtgtccattgtgtgatgtttttg

SEQ ID NO: 152 - protein, 58 aa, Homo sapiens
MLKRYWKILLKMVRRRLNCLLVNAFNWRKTSRKLEKFKKNLMLSLKLFIRRNKLKSYS

SEQ ID NO: 153 - DNA, 1639 bp, Homo sapiens; identical to SEQ ID NO: 151
  CDS (2)..(469)

SEQ ID NO: 154 - protein, 156 aa, Homo sapiens
HPAYLASDEITTVRKNLESRGVEVDPSLIKDTWHQVYRRHFLKTALNHCNLCRRGFYYYQRHFVDSELECNDVVLFWRIQRMLAITANTLRQQLTNTEVRRLEKNVKEVLEDFAEDGEKKIKLLTGKRVQLAEDLKKVREIQEKLDAFIEALHQEK

SEQ ID NO: 155 - DNA, 1639 bp, Homo sapiens; identical to SEQ ID NO: 151
  CDS (245)..(469)

SEQ ID NO: 156 - protein, 75 aa, Homo sapiens [sequence omitted]

SEQ ID NO: 157 - DNA, 5864 bp, Homo sapiens
  CDS (2)..(2935)
cacgggggctcccgcgtggccgtctcggcgcctgcgtgacctccccgccggcgggatgtggcgactacgtcgggccgctgtggcctgtgaggtctgccagtctttagtgaaacacagctctggaataaaaggaagtttaccactacaaaaactacatctggtttcacgaagcatttatcattcacatcatcctaccttaaagcttcaacgaccccaattaaggacatcctttcagcagttctcttctctgacaaaccttcctttacgtaaactgaaattctctccaattaaatatggctaccagcctcgcaggaatttttggccagcaagattagctacgagactcttaaaacttcgctatctcatactaggatcggctgttgggggtggctacacagccaaaaagacttttgatcagtggaaagatatgataccggaccttagtgaatataaatggattgtgcctgacattgtgtgggaaattgatgagtatatcgattttgagaaaattagaaaagcccttcctaattcagaagaccttgtaaagttagcaccagactttgacaagattgttgaaagccttagcttattgaaggacttttttacctcaggttctccggaagaaacggcgtttagagcaacagatcgtggatctgaaagtgacaagcattttagaaaggtgtcagacaaagagaaaattgaccaacttcaggaagaacttctgcacactcagttgaagtatcagagaatcttggaacgattagaaaaggagaacaaagaattgagaaaattagtattgcagaaagatgacaaaggcattcatcatagaaagcttaagaaatctttgattgacatgtattctgaagttcttgatgttctctctgattatgatgccagttataatacgcaagatcatctgccacgggttgttgtggttggagatcagagtgctggaaagactagtgtgttggaaatgattgcccaagctcgaatattcccaagaggatctggggagatgatgacacgttctccagttaaggtgactctgagtgaaggtcctcaccatgtggccctatttaaagatagttctcgggagtttgatcttaccaaagaagaagatcttgcagcattaagacatgaaatagaacttcgaatgaggaaaaatgtgaaagaaggctgtaccgttagccctgagaccatatccttaaatgtaaaaggccctggactacagaggatggtgcttgttgacttaccaggtgtgattaatactgtgacatcaggcatggctcctgacacaaaggaaactattttcagtatcagcaaagcttacatgcagaatcctaatgccatcatactgtgtattcaagatggatctgtggatgctgaacgcagtattgttacagacttggtcagtcaaatggaccctcatggaaggagaaccatattcgttttgaccaaagtagacctggcagagaaaaatgtagccagtccaagcaggattcagcagataattgaaggaaagctcttcccaatgaaagctttaggttattttgctgttgtaacaggaaaagggaacagctctgaaagcattgaagctataagagaatatgaagaagagttttttcagaattcaaagctcctaaagacaagcatgctaaaggcacaccaagtgactacaagaaatttaagccttgcagtatcagactgcttttggaaaatggtacgagagtctgttgaacaacaggctgatagtttcaaagcaacacgttttaaccttgaaactgaatggaagaataactatcctcgcctgcgggaacttgaccggaatgaactatttgaaaaagctaaaaatgaaatccttgatgaagttatcagtctgagccaggttacaccaaaacattgggaggaaatccttcaacaatctttgtgggaaagagtatcaactcatgtgattgaaaacatctaccttccagctgcgcagaccatgaattcaggaacttttaacaccacagtggatatcaagcttaaacagtggactgataaacaacttcctaataaagcagtagaggttgcttgggagaccctacaagaagaattttcccgctttatgacagaaccgaaagggaaagagcatgatgacatatttgataaacttaaagaggccgttaaggaagaaagtattaaacgacacaagtggaatgactttgcggaggacagcttgagggttattcaacacaatgctttggaagaccgatccatatctgataaacagcaatgggatgcagctatttattttatggaagaggctctgcaggctcgtctcaaggatactgaaaatgcaattgaaaacatggtgggtccagactggaaaaagaggtggttatactggaagaatcggacccaagaacagtgtgttcacaatgaaaccaagaatgaattggagaagatgttgaaatgtaatgaggagcacccagcttatcttgcaagtgatgaaataaccacagtccggaagaaccttgaatcccgaggagtagaagtagatccaagcttgattaaggatacttggcatcaagtttatagaagacattttttaaaaacagctctaaaccattgtaacctttgtcgaagaggtttttattactaccaaaggcattttgtagattctgagttggaatgcaatgatgtggtcttgttttggcgtatacagcgcatgcttgctatcaccgcaaatactttaaggcaacaacttacaaatactgaagttaggcgattagagaaaaatgttaaagaggtattggaagattttgctgaagatggtgagaagaagattaaattgcttactggtaaacgcgttcaactggcggaagacctcaagaaagttagagaaattcaagaaaaacttgatgctttcattgaagctcttcatcaggagaaataaattaaaatcgtactcataatcagctctgcatacatctgaagaacaaaaacatcaacgtcttttgtccagcctctttttcttctgctgttccacctttctaaacatacaataaagtcatgggataaaaataatcgatgtatgttacgggcgctttaaccatcagctgcctctcgaatggaagaacagtggtaatggattaacatcctattttgttgtactaaagtgacaaatcggaataatataattggtatggccattaggttcagtccttgaagataagaagcttgttctctgtttgttgtcttatttgtggtggcactcgtttaatggattaactgaggttgctcaatgttcagtttcttttccagaaatacaatgctaggtgttttgaaataaaacttatatagcaattgtttaaagttatcaattgtatataaaatcacagtagcctgctaaatcattgtatgtgtctgtagtattctattcccagaaactatttgaccatgataattcagtttatattcaccacatgaaagaaaaatgggtaacagaagaacccctaaaacaggttaatttggattgtaacgttcagtgaaagaaatttcaacccttcatagccagcgaagaaatttgccttggaagccaagtcagtaccagcttacctatttgattcagttgctgttttctcactctctatatccatttgaaattgatttattttagatgttgtatacttacgttaggctttctgttaatagtggtttttctcctgttgacagagccaccggattatgacacaggatgaggaagattaaggataatcaattgactaatttcatttagaatattatcaaacatttcaactaggtatcagaaaaaggctttctttcataagactattttaaatagaaattatttcaacaattaaagtaatgttgaccatccccctctcagctgaataaagaaaaatttagttcaatttattgcaatttaattacaatactaccttcacaacattttcatgtgttttaaataaatattttttaattggctaaaggacattcaagcaaagaaatgctttctttacttaaaatgtctatctcatttgctgccttttcactaagcctttactttgttaataaaagtgtccattgtgtgatgtttttgattttacagtttgctaaatcttattttcttggagttgctttttggtaacagccccattgctactccccattttattgttttacatcaatgcatgcttcgttgtgatccctcaagatgtaacacttggtatgctcggttgaggatatgaaaaaatacttccgaaaccaggaattcagtgtatgtttgttttatactgtttgataagaaaagtaggtccagccttaagcagcacagatgcgctggtagatgcatagtcaggaactttttttatttcttttaggtctagggacaggagtgaatagaaagggaggagagctctattatgttctatacacagattaggagatgaccttactgggtacacccctctaaccagtgcttacaggttaatgcatgttaatgaatatttttgcagttgtaaagcataacaattacaactacacatctatttctaaagaataaaacaggaccatatttatttacttctgtcaactatagaaagaaagaccttcagctgtatttccacagatttctcccaaggaaaaggctaatattagtcactactgttatcacatccctttgtataagttttaaaaagagatggagggagatcttcatttctttgaggagatcagtattgtaacgtatgtgaatagatgataacaattaatattactaaaagtcccacatgagagtcctgacgccctctccatgccccacagtaatgtggcttctttcatgggtttttttttcttctttttagctgatctcatcctaagcatgctttatttttccttgaaagctaggtatttatcaactgcagatgttattgaaagaaaataaaattcagtctcaagagtaaaccctgtgtcttgtgtctgtagttcaaaagtcagaaatgattctaatttaaacaaaaagatattaaatatacagaagttaaattcgaactagccacagaatcatttgtttttatgtcagaatttgcaaagagtggagtggacaaagctctgtatggaagactgaacaactgtaaatagatgatatccaaacttaatttggctaggacttcaattttaaaaatcagtgtacctaggcagtgcacagcacgaaataagtggcccttgcagcttccccgtttaacccactgtgctatagttgcgggtggaacagtcaacctttctagtagtttatgatattgccctctttgtattcccattttccacagttttttccgcagacttctttctgcaaattattcagcctccaaatgcaaatgaatgatataaaaataagtagggaacatggcagagagtggtgcttcccagcctcacaatgtgggaatttgacataggatgagagtcagagtataggtttaaaagataaaatctttagttaataattttgtatttatttattctagatgtatgtatctgaggaaagaaatctggtatttttgctttccaataaaggggatcaaagtaatggtttttctctcagttctctaagctggtctatgttatagctctagcagtatggaaatgtgctttaaaatatgcttaccttttgaatgatcatggctatatgttgttgagatatttgaaacttaccttgttttcacttgtgcactgtgaatgaactttgtattatttttttaaaaccttcacattacgtgtagatattattgcaacttatattttgcctgtgcttgatcaaaggtcatttgtgtagatgagtaattaaaaaatatttaaatcac

SEQ ID NO: 158 - protein, 978 aa, Homo sapiens
TGAPAWPSRRLRDLPAGGMWRLRRAAVACEVCQSLVKHSSGIKGSLPLQKLHLVSRSIYHSHHPTLKLQRPQLRTSFQQFSSLTNLPLRKLKFSPIKYGYQPRRNFWPARLATRLLKLRYLILGSAVGGGYTAKKTFDQWKDMIPDLSEYKWIVPDIVWEIDEYIDFEKIRKALPNSEDLVKLAPDFDKIVESLSLLKDFFTSGSPEETAFRATDRGSESDKHFRKVSDKEKIDQLQEELLHTQLKYQRILERLEKENKELRKLVLQKDDKGIHHRKLKKSLIDMYSEVLDVLSDYDASYNTQDHLPRVVVVGDQSAGKTSVLEMIAQARIFPRGSGEMMTRSPVKVTLSEGPHHVALFKDSSREFDLTKEEDLAALRHEIELRMRKNVKEGCTVSPETISLNVKGPGLQRMVLVDLPGVINTVTSGMAPDTKETIFSISKAYMQNPNAIILCIQDGSVDAERSIVTDLVSQMDPHGRRTIFVLTKVDLAEKNVASPSRIQQIIEGKLFPMKALGYFAVVTGKGNSSESIEAIREYEEEFFQNSKLLKTSMLKAHQVTTRNLSLAVSDCFWKMVRESVEQQADSFKATRFNLETEWKNNYPRLRELDRNELFEKAKNEILDEVISLSQVTPKHWEEILQQSLWERVSTHVIENIYLPAAQTMNSGTFNTTVDIKLKQWTDKQLPNKAVEVAWETLQEEFSRFMTEPKGKEHDDIFDKLKEAVKEESIKRHKWNDFAEDSLRVIQHNALEDRSISDKQQWDAAIYFMEEALQARLKDTENAIENMVGPDWKKRWLYWKNRTQEQCVHNETKNELEKMLKCNEEHPAYLASDEITTVRKNLESRGVEVDPSLIKDTWHQVYRRHFLKTALNHCNLCRRGFYYYQRHFVDSELECNDVVLFWRIQRMLAITANTLRQQLTNTEVRRLEKNVKEVLEDFAEDGEKKIKLLTGKRVQLAEDLKKVREIQEKLDAFIEALHQEK

SEQ ID NO: 159 - DNA, 1256 bp, Homo sapiens
  CDS (19)..(1227)
ccggcgggctggtgaggaatggagccggtaggctgctgcggcgagtgccgcggctcctccgtagacccgcggagcaccttcgtgttgagtaacctggcggaggtggtggagcgtgtgctcaccttcctgcccgccaaggcgttgctgcgggtggcctgcgtgtgccgcttatggagggagtgtgtgcgcagagtattgcggacccatcggagcgtaacctggatctccgcaggcctggcggaggccggccacctggaggggcattgcttggttcgcgtggtagcagaggagcttgagaatgttcgcatcttaccacatacagttctttacatggctgattcagaaactttcattagtctggaagagtgtcgtggccataagagagcaaggaaaagaactagtatggaaacagcacttgcccttgagaagctattccccaaacaatgccaagtccttgggattgtgaccccaggaattgtagtgactccaatgggatcaggtagcaatcgacctcaggaaatagaaattggagaatctggttttgctttattattccctcaaattgaaggaataaaaatacaaccctttcattttattaaggatccaaagaatttaacattagaaagacatcaactcactgaagtaggtcttttagataaccctgaacttcgtgtggtccttgtctttggttataattgctgtaaggtgggagccagtaattatctgcagcaagtagtcagcactttcagtgatatgaatatcatcttggctggaggccaggtggacaacctgtcatcactgacttctgaaaagaaccctctggatattgatgcctcgggtgtggttggactgtcatttagtggacaccgaatccagagtgccactgtgctcctcaacgaggacgtcagtgatgagaagactgctgaggctgcgatgcagcgcctcaaagcggccaacattccagagcataacaccattggcttcatgtttgcatgcgttggcaggggctttcagtattacagagccaaggggaatgttgaggctgatgcatttagaaagttttttcctagtgttcccttattcggcttctttggaaatggagaaattggatgtgatcggatagtcactgggaactttatattgaggaaatgtaatgaggtaaaagatgatgatctgtttcatagctatacaacaataatggcactcatacatctggggtcatctaaataataattaaagtggctttcataatatgt

SEQ ID NO: 160 - protein, 403 aa, Homo sapiens
MEPVGCCGECRGSSVDPRSTFVLSNLAEVVERVLTFLPAKALLRVACVCRLWRECVRRVLRTHRSVTWISAGLAEAGHLEGHCLVRVVAEELENVRILPHTVLYMADSETFISLEECRGHKRARKRTSMETALALEKLFPKQCQVLGIVTPGIVVTPMGSGSNRPQEIEIGESGFALLFPQIEGIKIQPFHFIKDPKNLTLERHQLTEVGLLDNPELRVVLVFGYNCCKVGASNYLQQVVSTFSDMNIILAGGQVDNLSSLTSEKNPLDIDASGVVGLSFSGHRIQSATVLLNEDVSDEKTAEAAMQRLKAANIPEHNTIGFMFACVGRGFQYYRAKGNVEADAFRKFFPSVPLFGFFGNGEIGCDRIVTGNFILRKCNEVKDDDLFHSYTTIMALIHLGSSK

SEQ ID NO: 161 - DNA, 1418 bp, Homo sapiens
  CDS (19)..(846)
ccggcgggctggtgaggaatggagccggtaggctgctgcggcgagtgccgcggctcctccgtagacccgcggagcaccttcgtgttgagtaacctggcggaggtggtggagcgtgtgctcaccttcctgcccgccaaggcgttgctgcgggtggcctgcgtgtgccgcttatggagggagtgtgtgcgcagagtattgcggacccatcggagcgtaacctggatctccgcaggcctggcggaggccggccacctggaggggcattgcttggttcgcgtggtagcagaggagcttgagaatgttcgcatcttaccacatacagttctttacatggctgattcagaaactttcattagtctggaagagtgtcgtggccataagagagcaaggaaaagaactagtatggaaacagcacttgcccttgagaagctattccccaaacaatgccaagtccttgggattgtgaccccaggaattgtagtgactccaatgggatcaggtagcaatcgacctcaggaaatagaaattggagaatctggttttgctttattattccctcaaattgaaggaataaaaatacaaccctttcattttattaaggatccaaagaatttaacattagaaagacatcaactcactgaagtaggtcttttagataaccctgaacttcgtgtggtccttgtctttggttataattgctgtaaggtgggagccagtaattatctgcagcaagtagtcagcactttcagtgatatgaatatcatcttggctggaggccaggtggacaacctgtcatcactgacttctgaaaagtatgtcttgtgtgcttctgatttcgtctgtgaatgaagggaaatggtctcaggttttgtcactttggggttaacaatttaaaaaacgtgtttaaagaattattaagataatagttcattccattttgtagtagacattggctaaggggcttactgaacataattctgcttacggttgaataattacatttttatatatattgtccttcaagaacttccttgagtcacattctccttaaaatttgacattgcctgttgatctttcctttgacagatgtggtactctgtgtgacctcaatgtgtcacctcctttctagtttcctcctttaaaggaaacacatggttagagtgtatctttatggcaaaacttctcagagcttctaatatgcccggtgctgtggaaatctggaaggagaatagcattacctgtgacagttcccaaatctgtttggtcacaaaacttttttccacagaatgtcttgcaagtcgtactggtttttggaaattctgtattagatcttttgaaaggctttttcaagcttaaaaattgtggatcttttttgttactaaggcttttgctttcaaagataaaaatatttgctcttc

SEQ ID NO: 162 - protein, 276 aa, Homo sapiens
MEPVGCCGECRGSSVDPRSTFVLSNLAEVVERVLTFLPAKALLRVACVCRLWRECVRRVLRTHRSVTWISAGLAEAGHLEGHCLVRVVAEELENVRILPHTVLYMADSETFISLEECRGHKRARKRTSMETALALEKLFPKQCQVLGIVTPGIVVTPMGSGSNRPQEIEIGESGFALLFPQIEGIKIQPFHFIKDPKNLTLERHQLTEVGLLDNPELRVVLVFGYNCCKVGASNYLQQVVSTFSDMNIILAGGQVDNLSSLTSEKYVLCASDFVCE

SEQ ID NO: 163 - DNA, 2860 bp, Homo sapiens
  CDS (24)..(2393)
gtgaggtagcggcggcaacgaccatggaggccacgtcccgggaggcggcgccagcgaagagctcggcctcgggccccaacgctccccccgccctgttcgagctgtgcgggcgggcggtgagcgcccatatgggggttctggagagcggggtgtgggccctcccaggcccaatacttcaaagcatcctacctctgctcaatatatattacttggagaggattgaggaaactgccctcaagaaaggcctctcaactcaggccatctggcgccgactctgggatgaactgatgaagacaaggccttccagtttggaaagtgtgacatgttggcgagccaagtttatggaggcctttttttcccatgttctacgtgggaccattgatgtgtcttctgacaggcgtctttgtgatcagcggttctcacctcttctgcacagctcccgccatgtccgacagctcaccatctgtaacatgctgcagggtgcaaccgagctggtggctgagcccaaccgcagggttctggagaccctggccagctccctgcacactctcaagttccgccacctgctgttctctgatgtggctgctcagcagtcacttcggcagctgttgcatcagctcattcaccatggggctgtcagtcaagtgtcgctatactcctggcctgtgcctgagtcagcccttttcatccttattctcaccatgagtgctggcttctggcaaccagggcctggtggcccaccctgccgcctctgtggagaggcctcccgaggccgggccccatcccgagatgaagggtccctcttattgggctcacgtcggccccgccgggatgctgctgagcgatgtgctgcagccctgatggccagccggcgtaagagtgaagccaagcagatgcccagagctgcacctgccactcgggtaacacgccggagcacacaggagagcctgacagcaggcggaacagaccttaagagggagctgcaccccccagccacctcccatgaggctcctggcaccaagcggtcaccttctgctccagcagccacctcctctgcctcttcttctacatcctcatacaaacgggcaccagctagctcagccccacagcctaagcccctaaagcgtttcaagcgagctgcagggaagaagggtgctcgcacccgtcaggggcctggtgcagagtctgaagacctgtatgacttcgtttttattgtggctggcgagaaggaggatggcgaagagatggagattggggaagtggcttgtggagctttggatggatcagatcccagctgcctggggcttccagcactggaagcttcacaaagattccgcagcatctccaccttggagctattcacagttccactctccacagaggcagccctgacactatgccacctgctgagctcctgggtgtcactggagagcctcacactctcctacaatggcctgggctctaacatcttccgcctgctagacagcctgcgggccctgtcaggccaggctggatgtcgcctccgtgccctgcatctcagtgacctgttctcaccactgcccatcctggagctgacacgtgctatcgtgcgagcactgcccctgctacgggtcctctctattcgtgttgaccacccaagccagcgggacaaccctggtgtgccagggaatgcagggccccctagccacataataggcgatgaggagataccagaaaactgcctggagcagttggagatgggatttccacggggagcccagccagccccactgctgtgctccgttctgaaggcctcgggttctctgcagcagctgtccctggatagtgccacctttgcctctccccaggattttgggcttgttttgcaaacactcaaagagtacaacctagccctgaaaagactgagcttccatgacatgaatctcgctgactgtcagagcgaggtgctctttttgctacagaatctgactctgcaagagattaccttctccttctgccgtctgtttgagaagcgcccagcccaatttctgcctgagatggttgctgctatgaagggcaactccacactgaagggcctccggctgccagggaaccgcctggggaatgctggcctgctggccttggcagatgttttctcagaggattcatcctcctctctctgtcagctggacatcagttccaactgcatcaagccagatgggcttctggagttcgccaagcggctggagcgctggggccgtggagcctttggtcacctgcgcctcttccaaaactggctggaccaggatgcagtcacagccagggaagccatccggcggctccgggctacctgccatgtggttagcgactcatgggactcatcccaggccttcgcagattatgttagcaccatgtgatggggcccgtacctcacagtctcatgctcggtaccatcagcttgcaggggctgaagcatgggctgcccagaaccccaaccaccagttctatctttctctttctgtcaccttttttctcttttttccttcttcccttgcactgaggtcctggaggccttgatgaggcccagcaaacaggcattctcacagctgggtttatagtctttgggccccttactcagtatcctgggaaccctgggccaggaggttacagtggtcatcataattgctgaagagatcccctcccctgcccctgggttcctgccttccctcctcaagcaggcacccaggctttagagaagtatagggggcttcttccctgctgggcttaccacactgctctcaggcctcaaaccctttcatacctttattcttttttttaaccaaaaaagtttttcttataaaataaattttgggcaaacatc

SEQ ID NO: 164 - protein, 790 aa, Homo sapiens
MEATSREAAPAKSSASGPNAPPALFELCGRAVSAHMGVLESGVWALPGPILQSILPLLNIYYLERIEETALKKGLSTQAIWRRLWDELMKTRPSSLESVTCWRAKFMEAFFSHVLRGTIDVSSDRRLCDQRFSPLLHSSRHVRQLTICNMLQGATELVAEPNRRVLETLASSLHTLKFRHLLFSDVAAQQSLRQLLHQLIHHGAVSQVSLYSWPVPESALFILILTMSAGFWQPGPGGPPCRLCGEASRGRAPSRDEGSLLLGSRRPRRDAAERCAAALMASRRKSEAKQMPRAAPATRVTRRSTQESLTAGGTDLKRELHPPATSHEAPGTKRSPSAPAATSSASSSTSSYKRAPASSAPQPKPLKRFKRAAGKKGARTRQGPGAESEDLYDFVFIVAGEKEDGEEMEIGEVACGALDGSDPSCLGLPALEASQRFRSISTLELFTVPLSTEAALTLCHLLSSWVSLESLTLSYNGLGSNIFRLLDSLRALSGQAGCRLRALHLSDLFSPLPILELTRAIVRALPLLRVLSIRVDHPSQRDNPGVPGNAGPPSHIIGDEEIPENCLEQLEMGFPRGAQPAPLLCSVLKASGSLQQLSLDSATFASPQDFGLVLQTLKEYNLALKRLSFHDMNLADCQSEVLFLLQNLTLQEITFSFCRLFEKRPAQFLPEMVAAMKGNSTLKGLRLPGNRLGNAGLLALADVFSEDSSSSLCQLDISSNCIKPDGLLEFAKRLERWGRGAFGHLRLFQNWLDQDAVTAREAIRRLRATCHVVSDSWDSSQAFADYVSTM

SEQ ID NO: 165 - DNA, 3190 bp, Homo sapiens
  CDS (109)..(840)
ttttctcctctgcagctgattggctctggagtgtggccagaagcctctctcctgcaattaaaggagtcgggtctctaactgttgatctgtttttttcccttctgagcaatggagcttaccatctttatcctgagactggccatttacatcctgacatttcccttgtacctgctgaactttctgggcttgtggagctggatatgcaaaaaatggttcccctacttcttggtgaggttcactgtgatatacaacgaacagatggcaagcaagaagcgggagctcttcagtaacctgcaggagtttgcgggcccctccgggaaactctccctgctggaagtgggctgtggcacgggggccaacttcaagttctacccacctgggtgcagggtgacctgtattgaccccaaccccaactttgagaagtttttgatcaagagcattgcagagaaccgacacctgcagtttgagcgctttgtggtagctgccggggagaacatgcaccaggtggctgatggctctgtggatgtggtggtctgcaccctggtgctgtgctctgtgaagaaccaggagcggattctccgcgaggtgtgcagagtgctgagaccgggaggggctttctatttcatggagcatgtggcagctgagtgttcgacttggaattacttctggcaacaagtcctggatcctgcctggcaccttctgtttgatgggtgcaacctgaccagagagagctggaaggccctggagcgggccagcttctctaagctgaagctgcagcacatccaggccccactgtcctgggagttggtgcgccctcatatctatggatatgctgtgaaatagtgtgagctggcagttaagagctgaatggctcaaagaatttaaagcttcagttttacatttaaaatgctaagtgggagaagagaaaccttttttttggggggcggtttttttggtttgttgttggttttttttttttttggcgggaagaaagagttttgctcttgttgcccaggctggagtgcaatgacgtgatctccgctcactgcaacctccacctcgcgggtttaagcgattcttctgcctcagcctccctagtagctgggattgcaggtgcccaccaccatgcccagctaatttgtatttttagttgagacagggtttcactacgttggccaggctggtcttgaactcctgatctcaggcaatccacccacctcagcctcccaaagtgctgggatgacaggcgtgagcaaccgcacccagcttaaggtttttttgttttgttttgagacggagttttcgctcttgttgcccaggctggagtgcaatgctgtgatctcagcttaccacaacctccacctcccgggttcaggtgattcacctgcctcagcctcctgagtagctggtattacaggcatgcgtcaccacgccggctaattttgtacttttagtagagatggtgtttccccacgttggtcagtctggtctcaaattcctgacctcaggtgatctgcctgcctcggcctcccaaggtgctgtgattgcagacgtcagccaccatgcctggcctgaaaccttttttaggtaaagttgaattccatccttaaaagtttctgttatatcctatttagccattttctattgtctcccaaagaattcacatcaaaaaaacagctttgaactcccccttcaaaggaaacagtcgactttcataattagcatctaccattatccccaaatcttattttattcattgacttgaaattttttccaattgcttttttttttttttttaaggttaagagcagaggtttactaggccaaagaaagagaatagctctctgttgcagagaggggtcctggagaaatgggttaccccagttgtcttatttaaatggttacccatcagattttaattttatcttctctttgagagcttggtaataagaagcacttaaatcactccaaagaagactttaaaaagggagcagtgaaaaggtcttaataatttattgattgaattaagaaatactagctaattaagaatctgagtctaaacagcacagattttttctttctgcttttaaattgtgttttaaaaaaagagacagggggctgggcgtggtggctcacgcctgtaatcctagcactttgggaggccgaggcgggtggatcacgaggtaggagttaaagaccagcctggccaacatggcaaaaccctactaaagatacaaaaaaaaaaaaaaattggccaggcgtggtggtgggtgcctgtaatcccaggtacttggaaggctgaggcaggagaatctcttgaacccagaaggcgaaggttgcagtgaaccgagatcatgccattgtactctagcctgggtgacaagagcaagactccgtctcaaaaaaaaaaaaaaaaaaaaaaaagaagtagagacagggagacagggtctcactgtgttgcctaggccggtcttgaactcctgggctcaagtgattctcccaccttgacctcctaaattgttgggattacaggtgtgagacagtgcacctggccgaaatagctcaagtttctgaaaaacaaatctgaatctatttgttattcttagcgtcactggtctggctttcagaattaacatacaaggttgccacacctagttctgcccagctttatgtcttttattccagtattccaccaaagtttgttttcctgcattccagttctcaagtcttaagataaagattgtacttgacagtttagtatatccataaaactatttgaggtggttaaggttcttgggttcattttccttaatactttgctgaatattgtagattgtaggcaatgaaaaagtctactaaattaggaaaaccttgaataattaggtatcctaggtaagagcccctaaacatcaagcaatctgtgagtctgtaaagaaataaatattttttggattattcttatctaattccacccctgttggaagatgatttctttgttctttgcaactatggaagctgtgaaaatcatcacaagtgcctctgaaagcgagtgttaggttggttagagggtttaatattttctgcaatggtttgtaggaattttaataaatgtagtatattttctgagatgattttgtaaaagtactattttaaatatcaaatcaaccaataaattcacatttgtgttagg

SEQ ID NO: 166 - protein, 244 aa, Homo sapiens
MELTIFILRLAIYILTFPLYLLNFLGLWSWICKKWFPYFLVRFTVIYNEQMASKKRELFSNLQEFAGPSGKLSLLEVGCGTGANFKFYPPGCRVTCIDPNPNFEKFLIKSIAENRHLQFERFVVAAGENMHQVADGSVDVVVCTLVLCSVKNQERILREVCRVLRPGGAFYFMEHVAAECSTWNYFWQQVLDPAWHLLFDGCNLTRESWKALERASFSKLKLQHIQAPLSWELVRPHIYGYAVK

SEQ ID NO: 167 - DNA, 2258 bp, Homo sapiens
  CDS (1)..(1023)
atgttcagtgttgccagcacctgctcagagttcatgaaatcaagcattttatggaatacacccaacagccaacctgaaaagggtctagatgctggacaagaaaataattctaactgcaattttacttctcgagatgggagcatttctcccgtgtcctcagagtgcagtgtggtagaaagaaccattcctgtctgccgagaatcccggagaaagcgcaaaagctacattgttatgtctcctgaaagtcctgtaaagtgtggcacacaaacaagctcaccccaggtattgaattcttcagcttcctactcagaaaatagaaaccaaccagttgactcttccttagcttttccttggacttttccttttggaattgatcgaaggattcagcctgagaaagttaagcaagcagaaaatacccggactttagaattacctggcccatctgagaccggtagaagaatggctgattatgtgacttgtgagagcacaaaaactaccttgcctttaggtaccgaagaagatgtccgggtcaaagtagaaagattaagtgatgaggaggtccatgaggaagtgtcccagcctgtcagtgcatctcagagttcgctgagtgatcagcagacagttccaggaagtgaacaagtccaagaggaccttctgattagtccacagtcttcctctataggctcagtagatgaaggcgtttctgagggcttgcctacacttcaaagcacgtctagcactaatgctcctccggatgatgatgatcgattggaaaatgttcagtatccctaccaactctacattgctccttccaccagcagtacagagcgaccaagtccaaatggtcccgacagaccttttcagtgtccaacctgcggggtgcgattcacccgtattcagaacctaaagcagcacatgctcatccactcaggaattaaaccatttcagtgtgaccgctgtgggaaaaagttcaccagggcttactcgctaaagatgcatcgcctaaagcatgaagtgatttcctagtaccggactacttaaaccaggaacaagaagagacccttgttcaatatgatcttggagaacacggttttgaaagcaactcctctgttcaaatgcctgtcatttcacaggtctcctcaacccagaattgtgaaagcacttttcccttggggtctcttggtgggctggcagaaaaagaggaagaagtgccagagcagccaaagagcagtgcttgtgctgaggcaaccagagatgaccccccaaaatcagagctgtcttctataactattgagtagttttgtgatttggcttcagttttgttttttggaaagtgcctgtgcttggtcttgtacatttaaatttaatttaattttttaaacaaaaaaagccgggtgggagggagggggagattgggaaagaatttccctttttactttctgagccctgaaactgattttatttttcctaactgagagattgcttctgtaagtacacaataacatgatgttgaaacagaaactatgagacttaaggagaactggttgacttaaaacatataccagttccttcttccattgttaaaagtaggctaacaacagatcattagctagagaggaaatcagatgattattgaccttcttgagacaagagggtacatgagaaactaattactaaacagcttgacaaatggcctgagtagatacttactgctgtacacaggatgttgtataatattttgtaaagcctgttgtttttggaagtatttatggtaagctttcttaaaaattattatggtaaatacttctgaaatccggcgtacttttctttaagctttgtcatttctgttatgatttttcatggtgaaattttggtactgagatgggcattctctgtacctttatagtaccactccaaaggcaaggaaccatgattgacaacagtcaagctgtggatgaaatgaccaggaacggagaatgaagtatgtaaatcccagcttcataggaactcttctcatactgcttttcagattaaaattgctgtttacctggtctccgaatgtaatgcctgactgtgtcattgcccggatcagttttccccctgccccatcaatatgttctcttgcatatattggcgtgctgccatataaagtaaaaatactggagatattctatattttatatataggtttatgtgttgttggggatgttttcattgtgctcttttggacataataaataattctctattgaggctac

SEQ ID NO: 168 - protein, 341 aa, Homo sapiens
MFSVASTCSEFMKSSILWNTPNSQPEKGLDAGQENNSNCNFTSRDGSISPVSSECSVVERTIPVCRESRRKRKSYIVMSPESPVKCGTQTSSPQVLNSSASYSENRNQPVDSSLAFPWTFPFGIDRRIQPEKVKQAENTRTLELPGPSETGRRMADYVTCESTKTTLPLGTEEDVRVKVERLSDEEVHEEVSQPVSASQSSLSDQQTVPGSEQVQEDLLISPQSSSIGSVDEGVSEGLPTLQSTSSTNAPPDDDDRLENVQYPYQLYIAPSTSSTERPSPNGPDRPFQCPTCGVRFTRIQNLKQHMLIHSGIKPFQCDRCGKKFTRAYSLKMHRLKHEVIS

SEQ ID NO: 169 - DNA, 2707 bp, Homo sapiens
  CDS (375)..(1472)
ggggagaaggaggaggagcagcaggcctccgggcccggcgccgccgcccgcaggacatttctgatttatttgcatccttgaagagcatctgtagaagaggaagtaaaagatgggtgtgaaaacatttactcatagctcctcttcccacagccaggaaatgcttggaaagctaaatatgctgcgaaatgatggacatttttgtgatatcactattcgtgtccaggacaaaatcttccgggcacataagtggttactaggcagcttgcagtgatttctttcgcaccaaacttgtaggccaagccgaggatgagaaacaagaaatgtgttggatctgccatcatgttaccatgactggctttatacctctttagaatatgcttacacgagccactctatcaattaacacagaaaatattattgatgttctagcagcagccagctatatgcaaatgttcagtgttgccagcacctgctcagagttcatgaaatcaagcattttatggaatacacccaacagccaacctgaaaagggtctagatgctggacaagaaaataattctaactgcaattttacttctcgagatgggagcatttctcccgtgtcctcagagtgcagtgtggtagaaagaaccattcctgtctgccgagaatcccggagaaagcgcaaaagctacattgttatgtctcctgaaagtcctgtaaagtgtggcacacaaacaagctcaccccaggtattgaattcttcagcttcctactcagaaaatagaaaccaaccagttgactcttccttagcttttccttggacttttccttttggaattgatcgaaggattcagcctgagaaagttaagcaagcagaaaatacccggactttagaattacctggcccatctgagaccggtagaagaatggctgattatgtgacttgtgagagcacaaaaactaccttgcctttaggtaccgaagaagatgtccgggtcaaagtagaaagattaagtgatgaggaggtccatgaggaagtgtcccagcctgtcagtgcatctcagagttcgctgagtgatcagcagacagttccaggaagtgaacaagtccaagaggaccttctgattagtccacagtcttcctctataggctcagtagatgaaggcgtttctgagggcttgcctacacttcaaagcacgtctagcactaatgctcctccggatgatgatgatcgattggaaaatgttcagtatccctaccaactctacattgctccttccaccagcagtacagagcgaccaagtccaaatggtcccgacagaccttttcagtgtccaacctgcggggtgcgattcacccgtattcagaacctaaagcagcacatgctcatccactcaggaattaaaccatttcagtgtgaccgctgtgggaaaaagttcaccagggcttactcgctaaagatgcatcgcctaaagcatgaagtgatttcctagtaccggactacttaaaccaggaacaagaagagacccttgttcaatatgatcttggagaacacggttttgaaagcaactcctctgttcaaatgcctgtcatttcacaggtctcctcaacccagaattgtgaaagcacttttcccttggggtctcttggtgggctggcagaaaaagaggaagaagtgccagagcagccaaagagcagtgcttgtgctgaggcaaccagagatgaccccccaaaatcagagctgtcttctataactattgagtagttttgtgatttggcttcagttttgttttttggaaagtgcctgtgcttggtcttgtacatttaaatttaatttaattttttaaacaaaaaaagccgggtgggagggagggggagattgggaaagaatttccctttttactttctgagccctgaaactgattttatttttcctaactgagagattgcttctgtaagtacacaataacatgatgttgaaacagaaactatgagacttaaggagaactggttgacttaaaacatataccagttccttcttccattgttaaaagtaggctaacaacagatcattagctagagaggaaatcagatgattattgaccttcttgagacaagagggtacatgagaaactaattactaaacagcttgacaaatggcctgagtagatacttactgctgtacacaggatgttgtataatattttgtaaagcctgttgtttttggaagtatttatggtaagctttcttaaaaattattatggtaaatacttctgaaatccggcgtacttttctttaagctttgtcatttctgttatgatttttcatggtgaaattttggtactgagatgggcattctctgtacctttatagtaccactccaaaggcaaggaaccatgattgacaacagtcaagctgtggatgaaatgaccaggaacggagaatgaagtatgtaaatcccagcttcataggaactcttctcatactgcttttcagattaaaattgctgtttacctggtctccgaatgtaatgcctgactgtgtcattgcccggatcagttttccccctgccccatcaatatgttctcttgcatatattggcgtgctgccatataaagtaaaaatactggagatattctatattttatatataggtttatgtgttgttggggatgttttcattgtgctcttttggacataataaataattctctattgaggctac

SEQ ID NO: 170 - protein, 366 aa, Homo sapiens
MLTRATLSINTENIIDVLAAASYMQMFSVASTCSEFMKSSILWNTPNSQPEKGLDAGQENNSNCNFTSRDGSISPVSSECSVVERTIPVCRESRRKRKSYIVMSPESPVKCGTQTSSPQVLNSSASYSENRNQPVDSSLAFPWTFPFGIDRRIQPEKVKQAENTRTLELPGPSETGRRMADYVTCESTKTTLPLGTEEDVRVKVERLSDEEVHEEVSQPVSASQSSLSDQQTVPGSEQVQEDLLISPQSSSIGSVDEGVSEGLPTLQSTSSTNAPPDDDDRLENVQYPYQLYIAPSTSSTERPSPNGPDRPFQCPTCGVRFTRIQNLKQHMLIHSGIKPFQCDRCGKKFTRAYSLKMHRLKHEVIS

SEQ ID NO: 171 - DNA, 2032 bp, Homo sapiens
  CDS (125)..(400)
aaaaaaaaaaaaaaaaaaaaaaaaaaaaaaaaaaaaaacagctgagccgtctgggaagggatgcatcttttcttctgtatgcttgagtcaagaactctaagtcatcttggtaataccgggttggatgcttaaagctgcagcaaaaagaccagaactttcaggaaaaaacactatatccaacaactcagatatggcagaagtgaagtcaatgttccgggaagttcttccaaagcaggggccactgtttgtggaagatataatgacaatggtgctgtgtaaacccaaacttttacccttaaaatctctgactctggaaaaactagagaaaatgcatcaagcagcacagaatacaattcgccaacaagaaatggcagaaaaggatcaacggcaaataacccactgaatgataactgagcactttagggaacaacctgccttatctactatttaacaataactagaaaatatgcttctgtgtgctgaaagtagtatgtgttatcaataaaattgatagtattcatagaaatacaaaaatatccaagattgatgaaatttgtattgtgaatgtaaacactctggtttgtattgaacataaacagttaaactatgaaccaagttttatggggtttaagtcatgtttttagaattgcaaattaaattatttgttcaccattcctattgctatcttttatagataacattcttgggatcttttatagcattcttgggcacaagggattaaatacaacttttatatacagaggatctttacatgtttattaaatctgaatttgaagatacattccaatcttgcataaagtgtttgttgggcttttacattacgtaattaaaaaacaaaattttttaaccaattttatgtgccatgtcacgtttaatgctatcttgtgtgaccagatcccaccagtaatgacaaaactgtcttaaacctcatttttttttttttttgagacaagagtttcactcttgttgcccaaacgagagcaatggcaccatctcgactcactgcaacctctgcctcccaggttcaagcaattctcctgcctcagcctcccaagtagctgggattacacgcatgcgccaccatgcctggctacttttgtatttttaatagagacagggtttcttcatgttggtcaagctggtcatgaactcccaacctcaagtgatccgcccacctcggcctcccaaagtgctgggattacaggcatgagccaccgtgcccagcccttaaatctcatttttaagaaaccctcacctattctgtagtcagctaagcttttaattacattaattttaagcacttgagaataaaatgactgcatttatcatccaagtgtcaaacaattaaaaacctaaaaatggtaactatatataagctgaggtaatatgggcttgataaagcccatgaggtaaatatgaacactaaacttggttttaattctaacagactatatctaaacctgtaagcagtatactcctaacagtaccctcataaattctgaatataattcttgtttgctgcagtcaatatttggcagtttaaattagcacagacgttgaggccttgctgagttattaggctatgtaaaagaggttaaaaatatgatcattctttattgttaattggtaatattttctcatacattaggtaaatgtcaagctttgggtctctggagtataactttttgtaacattagccattatttggtaacagaatttaaggatgatggaatgatggaaggtattacatatttctaaaacttaattaagctctaggtcagataacaatggagtaaagtgatacctgcatttttttccccagtgtaatcttaatttactattgtatttttcacttaaaattttgtagggaaaaaaagttttcaagggaacactaagattaaattgactaggttcaaatatgcttccttatgagattcaaaatttactgtgtgaaattaaagtttaagagacctaaaaaaatgtactcccaataaagaatcaatactgcttc

SEQ ID NO: 172 - protein, 92 aa, Homo sapiens
MLKAAAKRPELSGKNTISNNSDMAEVKSMFREVLPKQGPLFVEDIMTMVLCKPKLLPLKSLTLEKLEKMHQAAQNTIRQQEMAEKDQRQITH

SEQ ID NO: 173 - DNA, 2002 bp, Homo sapiens
  CDS (74)..(1825)
ttacatctatcgccttgtggctgattacactctagaaaagaagatctatgaccgtcagatttccaagcagggcatgtcagatcgggtggtggatgatctaaatccaatgctgaacttcacacggaaagaggtggaaaacctactgcactttgttgagaaggagccagctccccaagtttccttgaacgtaaaggggatcaaggagtcagtcctgcaactggcctgtctgaagtaccctcacctcatcaccaaggagcctttcgagcatgagtcattgctcttgaaccgaaaggatcacaagctaaccaaggctgagaaaaaagcagcaaagaaaagctatgaggaagacaaacgcacatcagtcccctatacccgcccatcgtatgcgcagtattaccctgccagcgatcagagcctgaccagcatccccgccttcagccagagaaactggcagccaactttgaagggtgatgaaaagcctgtggccagtgttcgtcctgtgcagtccacccccatccccatgatgccccggcatgtcccattgggaggaagtgtaagctctgcctccagcacaaatccatccatgaactttcccatcaactacttgcagcgtgcaggagtccttgtgcagaaggtggtcaccacgacagatattgttattcctggactcaacagctccacagatgtacaggcaagaattaatgctggtgagagcatccacatcatccgtgggacaaaagggacgtacatccgtaccagtgatggacggatctttgctgtccgggcaactggcaaaccaaaggttcctgaagatggtcggatggctgcctcaggttcccagggaccttcttgcgagtccacaagcaacggcagacacagtgcctcatcacccaaagcccccgaccctgaggggctggccaggcccgtctctcctgacagcccagagatcatcagtgagcttcagcagtatgcagatgtggctgctgcccgggaatcccgtcagagctccccaagcaccaatgccgccctgcctggccccccggcccaacttatggacagcagtgctgttcccgggacagctctcggaactgagcctcgactagggggtcattgcctcaatagttccctcttggtgactggccagccctgtggtgacaggcacccagtgctggacttaaggggccacaagcgaaagttggccacaccacctgctgcccaggagtcatcccgccggcggtccaggaagggtcatctgccagcccccgtgcagccgtatgaacacgggtatccagtctctggcgggtttgccatgccacccgtctccttaaaccataacctcaccacccccttcacctcccaggctggggagaactccctgtttatgggcagtaccccctcctactaccagctgtccaatttgctggcagatgcccgcctggtgtttccagtgactactgaccctctggtgccagcaggccccgtcagttcctcttccacggctacctcagtcactgccagcaacccctccttcatgctcaacccttctgtgccagggatactacccagctattcactcccattctcacagccactcctgtccgagccgaggatgtttgcgccttttccttcccctgtcttgcccagcaacctttcgcggggcatgtctatctatccaggctacatgtccccacatgcaggctacccagctggtggcctcctacggtcccaggtgcctccatttgactctcatgaggttgccgaggttgggttcagctccaatgatgatgaggataaagacgatgatgtgatagaggtcactgggaaatagctagggagcccctccccacctcacttggggcccccagcaggttgcccaccaagctggaaggcagtgatttagaccttttgagaataggacacttggcaggagggaaaaggaagaggacaaaggagggtggttggccaaagtggcagagctctgttgctgtttaacaaaagaggc

SEQ ID NO: 174 - protein, 584 aa, Homo sapiens
MSDRVVDDLNPMLNFTRKEVENLLHFVEKEPAPQVSLNVKGIKESVLQLACLKYPHLITKEPFEHESLLLNRKDHKLTKAEKKAAKKSYEEDKRTSVPYTRPSYAQYYPASDQSLTSIPAFSQRNWQPTLKGDEKPVASVRPVQSTPIPMMPRHVPLGGSVSSASSTNPSMNFPINYLQRAGVLVQKVVTTTDIVIPGLNSSTDVQARINAGESIHIIRGTKGTYIRTSDGRIFAVRATGKPKVPEDGRMAASGSQGPSCESTSNGRHSASSPKAPDPEGLARPVSPDSPEIISELQQYADVAAARESRQSSPSTNAALPGPPAQLMDSSAVPGTALGTEPRLGGHCLNSSLLVTGQPCGDRHPVLDLRGHKRKLATPPAAQESSRRRSRKGHLPAPVQPYEHGYPVSGGFAMPPVSLNHNLTTPFTSQAGENSLFMGSTPSYYQLSNLLADARLVFPVTTDPLVPAGPVSSSSTATSVTASNPSFMLNPSVPGILPSYSLPFSQPLLSEPRMFAPFPSPVLPSNLSRGMSIYPGYMSPHAGYPAGGLLRSQVPPFDSHEVAEVGFSSNDDEDKDDDVIEVTGK

SEQ ID NO: 175 - DNA, 3901 bp, Homo sapiens
  CDS (2)..(3724)
ggaagaagagaagggtggcacccatgtcaatgatgtcttaaaccagcgtgacgcccttgggcgggtccttgtcaacctaaaccaccctccagaggaggaaaatgtcttccttgccccacagttggcacgggctgtgaaacctcatcagattggcgggatccggttcctttacgataacctagtggagtctctggagaggtttaagaccagcagtggctttggctgtattctggcccacagcatgggtctggggaaaactttgcaagtgatctctttcatcgacgtcctcttccgccacacgccagccaaaacagtccttgccattgtgccggttaatactcttcagaattggctggcagagttcaacatgtggcttccacctcctgaagccctcccggctgacaacaagcctgaagaagtccagcctcggttctttaaagttcacatcttgaatgatgagcacaagacgatggcatctcgtgctaaagtgatggctgattgggtgtcagagggtggcgtgctgctgatggggtacgagatgtacagactcctcactctgaagaaatcatttgccacaggtagaccgaagaaaaccaagaagcgttctcacccagtcatcattgatctagatgaggaagatcggcagcaggagtttcggagagagtttgagaaggctttatgccgccctggccctgatgtagtaatctgtgatgagggacaccgcatcaaaaactgccaggccagcacctcacaggctctgaagaatatccgctctcgccgccgggtggtgctgactgggtaccctctgcaaaacaacctcattgagtactggtgcatggtggactttgtgcgcccagacttccttggcacccggcaggagttcagcaacatgtttgaacgccctatcctgaatgggcaatgtattgacagcacacctcaggacgtccgcctcatgcggtaccggagccatgtcctgcacagtcttctggagggctttgtgcagaggagaggccacactgtgctgaagattcatctccctgccaaggaagaaaatgtgatccttgtgcggctctccaagatccagcgagatttgtatacacagttcatggatcgcttccgggactgtggtagcagcggttggctggggctgaacccccttaaggcattctgtgtgtgttgcaagatctggaatcaccctgatgtgctgtatgaagcccttcagaaggagagcttggccaatgagcaggacctagacgtggaagaacttggctctgcagggaccagtgcccgctgtccaccacagggaacaaaaggcaagggagaggatagcaccttggcttcctcgatgggagaggcaaccaatagcaagttcctacagggcgttggcttcaaccctttccaggagcgaggcaacaacattgtcacatatgaatgggccaaggaccttctgactaattaccagactggagtcctagaaaactctcccaagatggtactgcttttccacctgattgaggaaagtgtgaagcttggggacaagatccttgtgtttagccagagtctttccaccttggctctcatcgaggaattccttggaaaacgagaagtaccctgtccacctggtaccgaggggcaaggagcacagaagtgggttcgaaacatcagctacttccggctagatggtagcacccctgcctttgagagggagcggcttattaatcagttcaatgatcccagcaacctcaccacctggctgttccttctctctacaagggccggatgcttgggtgtgaatctgattggtgccaaccgagtggtggtgtttgatgcttcctggaacccttgccatgatgcccaggcagtatgtcgggtataccgttatggccagaaaaagccctgttacatctatcgccttgtggctgattacactctagaaaagaagatctatgaccgtcagatttccaagcagggcatgtcagatcgggtggtggatgatctaaatccaatgctgaacttcacacggaaagaggtggaaaacctactgcactttgttgagaaggagccagctccccaagtttccttgaacgtaaaggggatcaaggagtcagtcctgcaactggcctgtctgaagtaccctcacctcatcaccaaggagcctttcgagcatgagtcattgctcttgaaccgaaaggatcacaagctaaccaaggctgagaaaaaagcagcaaagaaaagctatgaggaagacaaacgcacatcagtcccctatacccgcccatcgtatgcgcagtattaccctgccagcgatcagagcctgaccagcatccccgccttcagccagagaaactggcagccaactttgaagggtgatgaaaagcctgtggccagtgttcgtcctgtgcagtccacccccatccccatgatgccccggcatgtcccattgggaggaagtgtaagctctgcctccagcacaaatccatccatgaactttcccatcaactacttgcagcgtgcaggagtccttgtgcagaaggtggtcaccacgacagatattgttattcctggactcaacagctccacagatgtacaggcaagaattaatgctggtgagagcatccacatcatccgtgggacaaaagggacgtacatccgtaccagtgatggacggatctttgctgtccgggcaactggcaaaccaaaggttcctgaagatggtcggatggctgcctcaggttcccagggaccttcttgcgagtccacaagcaacggcagacacagtgcctcatcacccaaagcccccgaccctgaggggctggccaggcccgtctctcctgacagcccagagatcatcagtgagcttcagcagtatgcagatgtggctgctgcccgggaatcccgtcagagctccccaagcaccaatgccgccctgcctggccccccggcccaacttatggacagcagtgctgttcccgggacagctctcggaactgagcctcgactagggggtcattgcctcaatagttccctcttggtgactggccagccctgtggtgacaggcacccagtgctggacttaaggggccacaagcgaaagttggccacaccacctgctgcccaggagtcatcccgccggcggtccaggaagggtcatctgccagcccccgtgcagccgtatgaacacgggtatccagtctctggcgggtttgccatgccacccgtctccttaaaccataacctcaccacccccttcacctcccaggctggggagaactccctgtttatgggcagtaccccctcctactaccagctgtccaatttgctggcagatgcccgcctggtgtttccagtgactactgaccctctggtgccagcaggccccgtcagttcctcttccacggctacctcagtcactgccagcaacccctccttcatgctcaacccttctgtgccagggatactacccagctattcactcccattctcacagccactcctgtccgagccgaggatgtttgcgccttttccttcccctgtcttgcccagcaacctttcgcggggcatgtctatctatccaggctacatgtccccacatgcaggctacccagctggtggcctcctacggtcccaggtgcctccatttgactctcatgaggttgccgaggttgggttcagctccaatgatgatgaggataaagacgatgatgtgatagaggtcactgggaaatagctagggagcccctccccacctcacttggggcccccagcaggttgcccaccaagctggaaggcagtgatttagaccttttgagaataggacacttggcaggagggaaaaggaagaggacaaaggagggtggttggccaaagtggcagagctctgttgctgtttaacaaaagaggc

SEQ ID NO: 176 - protein, 1241 aa, Homo sapiens
EEEKGGTHVNDVLNQRDALGRVLVNLNHPPEEENVFLAPQLARAVKPHQIGGIRFLYDNLVESLERFKTSSGFGCILAHSMGLGKTLQVISFIDVLFRHTPAKTVLAIVPVNTLQNWLAEFNMWLPPPEALPADNKPEEVQPRFFKVHILNDEHKTMASRAKVMADWVSEGGVLLMGYEMYRLLTLKKSFATGRPKKTKKRSHPVIIDLDEEDRQQEFRREFEKALCRPGPDVVICDEGHRIKNCQASTSQALKNIRSRRRVVLTGYPLQNNLIEYWCMVDFVRPDFLGTRQEFSNMFERPILNGQCIDSTPQDVRLMRYRSHVLHSLLEGFVQRRGHTVLKIHLPAKEENVILVRLSKIQRDLYTQFMDRFRDCGSSGWLGLNPLKAFCVCCKIWNHPDVLYEALQKESLANEQDLDVEELGSAGTSARCPPQGTKGKGEDSTLASSMGEATNSKFLQGVGFNPFQERGNNIVTYEWAKDLLTNYQTGVLENSPKMVLLFHLIEESVKLGDKILVFSQSLSTLALIEEFLGKREVPCPPGTEGQGAQKWVRNISYFRLDGSTPAFERERLINQFNDPSNLTTWLFLLSTRAGCLGVNLIGANRVVVFDASWNPCHDAQAVCRVYRYGQKKPCYIYRLVADYTLEKKIYDRQISKQGMSDRVVDDLNPMLNFTRKEVENLLHFVEKEPAPQVSLNVKGIKESVLQLACLKYPHLITKEPFEHESLLLNRKDHKLTKAEKKAAKKSYEEDKRTSVPYTRPSYAQYYPASDQSLTSIPAFSQRNWQPTLKGDEKPVASVRPVQSTPIPMMPRHVPLGGSVSSASSTNPSMNFPINYLQRAGVLVQKVVTTTDIVIPGLNSSTDVQARINAGESIHIIRGTKGTYIRTSDGRIFAVRATGKPKVPEDGRMAASGSQGPSCESTSNGRHSASSPKAPDPEGLARPVSPDSPEIISELQQYADVAAARESRQSSPSTNAALPGPPAQLMDSSAVPGTALGTEPRLGGHCLNSSLLVTGQPCGDRHPVLDLRGHKRKLATPPAAQESSRRRSRKGHLPAPVQPYEHGYPVSGGFAMPPVSLNHNLTTPFTSQAGENSLFMGSTPSYYQLSNLLADARLVFPVTTDPLVPAGPVSSSSTATSVTASNPSFMLNPSVPGILPSYSLPFSQPLLSEPRMFAPFPSPVLPSNLSRGMSIYPGYMSPHAGYPAGGLLRSQVPPFDSHEVAEVGFSSNDDEDKDDDVIEVTGK

SEQ ID NO: 177 - DNA, 904 bp, Homo sapiens
  CDS (136)..(903)
aaacgaaacggtaaccagccctgggaagcccgcaagaggcctcagcggtggccgtccgagcgccgagaggtgagggtgcccccgcctcacctgcagaggggccgttccgggctcgaacccggcaccttccggaaaatggcggctgccaggcccagcctgggccgagtcctcccaggatcctctgtcctgttcctgtgtgacatgcaggagaagttccgccacaacatcgcctacttcccacagatcgtctcagtggctgcccgcatgctcaaggtggcccggctgcttgaggtgccagtcatgctgacggagcagtacccacaaggcctgggccccacggtgcccgagctggggactgagggccttcggccgctggccaagacctgcttcagcatggtgcctgccctgcagcaggagctggacagtcggccccagctgtgctctgtgctgctctgtggcattgaggcacaggcctgcatcttgaacacgaccctggacctcctagaccgggggctgcaggtccatgtggtggtggacgcctgctcctcacgcagccaggtggaccggctggtggctctggcccgcatgagacagagtggtgccttcctctccaccagcgaagggctcattctgcagcttgtgggcgatgccgtccacccccagttcaaggagatccagaaactcatcaaggagcccgccccagacagcggactgctgggcctcttccaaggccagctgctcccggaaatgcaaatgagactcctggaaactgggtgggaattggctgagccgagatggaggcggggctcggccccgggccacttcacggggcgggaaggggaggggaagaagagtctcagactgtgggacacggactcgcagaataaacatatatgtggctgtg

SEQ ID NO: 178 - protein, 256 aa, Homo sapiens
MAAARPSLGRVLPGSSVLFLCDMQEKFRHNIAYFPQIVSVAARMLKVARLLEVPVMLTEQYPQGLGPTVPELGTEGLRPLAKTCFSMVPALQQELDSRPQLCSVLLCGIEAQACILNTTLDLLDRGLQVHVVVDACSSRSQVDRLVALARMRQSGAFLSTSEGLILQLVGDAVHPQFKEIQKLIKEPAPDSGLLGLFQGQLLPEMQMRLLETGWELAEPRWRRGSAPGHFTGREGEGKKSLRLWDTDSQNKHICGC

SEQ ID NO: 179 - DNA, 1123 bp, Homo sapiens
  CDS (138)..(800)
cctaacgaaacggtaaccagccctgggaagcccgcaagaggcctcagcggtggccgtccgagagccgagaggtgagggtgcccccgcctcacctgcagaggggccgttccgggctcgaacccggcaccttccggaaaatggcggctgccaggcccagcctgggccgagtcctcccaggatcctctgtcctgttcctgtgtgacatgcaggagaagttccgccacaacatcgcctacttcccacagatcgtctcagtggctgcccgcatgctcaaggtggcccggctgcttgaggtgccagtcatgctgacggagcagtacccacaaggcctgggccccacggtgcccgagctggggactgagggccttcggccgctggccaagacctgcttcagcatggtgcctgccctgcagcaggagctggacagtcggccccagctgcgctctgtgctgctctgtggcattgaggcacaggcctgcatcttggacccccgttcttatccggggttggccctgacctctctctacccacagaacacgaccctggacctcctagaccgggggctgcaggtccatgtggtggtggacgcctgctcctcacgcagccaggtggaccggctggtggctctggcccgcatgagacagagtggtgccttcctctccaccagcgaagggctcattctgcagcttgtgggcgatgccgtccacccccagttcaaggagatccagaaactcatcaaggagcccgccccagacagcggactgctgggcctcttccaaggccagaactccctcctccactgaactccaaccctgccttgagggaagaccaccctcctgtcacccggacctcagtggaagcccgttccccccatccctggatcccaagagtggtgcgatccaccaggagtgccgcccccttgtgggggggggcagggtgctgccttcccattggacagctgctcccggaaatgcaaatgagactcctggaaactgggtgggaattggctgagccaagatggaggcggggctcggccccgggccacttcacggggcgggaaggggaggggaagaagagtctcagactgtgggacacggactcgcagaataaacatatatgtggc

SEQ ID NO: 180 - protein, 221 aa, Homo sapiens
MAAARPSLGRVLPGSSVLFLCDMQEKFRHNIAYFPQIVSVAARMLKVARLLEVPVMLTEQYPQGLGPTVPELGTEGLRPLAKTCFSMVPALQQELDSRPQLRSVLLCGIEAQACILDPRSYPGLALTSLYPQNTTLDLLDRGLQVHVVVDACSSRSQVDRLVALARMRQSGAFLSTSEGLILQLVGDAVHPQFKEIQKLIKEPAPDSGLLGLFQGQNSLLH

SEQ ID NO: 181 - DNA, 2801 bp, Homo sapiens
  CDS (69)..(1070)
ggctgtccgcggtgccggctgggggcggagaggcggcggtgggctccctggggtgtgtgagcccggtgatggagccgggcccgacagccgcgcagcggaggtgttcgttgccgccgtggctgccgctggggctgctgctgtggtcggggctggccctgggcgcgctccccttcggcagcagtccgcacagggtcttccacgacctcctgtcggagcagcagttgctggaggtggaggacttgtccctgtccctcctgcagggtggagggctggggcctctgtcgctgcccccggacctgccggatctggatcctgagtgccgggagctcctgctggacttcgccaacagcagcgcagagctgacagggtgtctggtgcgcagcgcccggcccgtgcgcctctgtcagacctgctaccccctcttccaacaggtcgtcagcaagatggacaacatcagccgagccgcggggaatacttcagagagtcagagttgtgccagaagtctcttaatggcagatagaatgcaaatagttgtgattctctcagaattttttaataccacatggcaggaggcaaattgtgcaaattgtttaacaaacaacagtgaagaattatcaaacagcacagtatatttccttaatctatttaatcacaccctgacctgctttgaacataaccttcaggggaatgcacatagtcttttacagacaaaaaattattcagaagtatgcaaaaactgccgtgaagcatacaaaactctgagtagtctgtacagtgaaatgcaaaaaatgaatgaacttgagaataaggctgaacctggaacacatttatgcattgatgtggaagatgcaatgaacatcactcgaaaactatggagtcgaactttcaactgttcagtcccttgcagtgacacagtgcctgtaattgctgtttctgtgttcattctctttctacctgttgtcttctaccttagtagctttcttcactcagagcaaaagaaacgcaaactcattctgcccaaacgtctcaagtccagtaccagttttgcaaatattcaggaaaattcaaactgagacctacaaaatggagaattgacatatcacgtgaatgaatggtggaagacacaacttggtttcagaaagaagataaactgtgatttgacaagtcaagctcttaagaaatacaaggacttcagatccatttttaaataagaattttcgatttttctttccttttccacttctttctaacagatttggatatttttaatttccaggcatagcaatgttatctattttaatgtgtatttgtcacaataacagaacatgcaagaacaatcattattttattttataggcatttgattactattctagacttctggtatcttcttactaacataaatatctcaagtagaaaagtttttgaaaactaacatttaaaaattaatcagttacagtaaagactttgaaaaagaaatgtacttgttaggaagtagcttaattaccccccattgcagtattattgttatatatatagttaatatgttgtacatcacaataatatataattcagtctctagtttccctagagtcatttttgaaaccactgattgcaaacctccctgacaatttttaaaagtagtaagccacattacatttatctttgtaaaaagatttatggtaactggtttcttacttgacttttataaatagtattttacatcttatttttgcctttatttcataagtatttaaaaatcactggattgctttattatattcagggcaatatggattatttttataccaaggatttgcatcgtgaattacattaagttatttggcaatttataatttattactactttaaatcaaatgtagcattatcacactgtatttaaattgtcattttttaaaggaatattttcttcttaagatatatagaggattttggagaagagagacaggaggggtaaaaccagcttaaggttcagcgagcagaaagggacctgagaggatgctcactgtaagactgttggacagtggtgtgtattgaggggatgaatcggaacgatagtctcatgcagaaaatagtgagattaagatcatccttattgtttctaaattatttcaatcagatgaaagtgatacgattgaaatgaaatcacatagttcgtgctcagaaattctattttggtatgtttgtattagcctttagaaaaaacactccgtttcagaattgttcacagttttatttcttaggtttttagagttcaggatttcatttattaatttcttcttgcttttttggtggaaataggctttgttgtaaacattaagaatataaaatctcctctatatagaaacaagaattttgttaaaaagagaatttgaatcccttcctatactataaaatgctctatagggagacaaagtgtttcttttttcttttatgtttactgtttatgtggagtgaaatataaggctcttggatgtataacatactcaaaagctgttacactttctctgatctgctgtgatccactgaaaatgtgctggggtttgttctgctgtcactgtttatgctgctggaacttagcactgtcttgatttgaagcatatgattgagagccatttgaagcaatcttcattaatgcagataaaacaagtttacatgtgcagagttagaaaatgacatgttcaattctgtaagtggtgactttttgagcacctttcagtattatgtatttgtaaaaaccattgtttttggatataaagctaataagcactttaaaaagg

SEQ ID NO: 182 - protein, 334 aa, Homo sapiens
MEPGPTAAQRRCSLPPWLPLGLLLWSGLALGALPFGSSPHRVFHDLLSEQQLLEVEDLSLSLLQGGGLGPLSLPPDLPDLDPECRELLLDFANSSAELTGCLVRSARPVRLCQTCYPLFQQVVSKMDNISRAAGNTSESQSCARSLLMADRMQIVVILSEFFNTTWQEANCANCLTNNSEELSNSTVYFLNLFNHTLTCFEHNLQGNAHSLLQTKNYSEVCKNCREAYKTLSSLYSEMQKMNELENKAEPGTHLCIDVEDAMNITRKLWSRTFNCSVPCSDTVPVIAVSVFILFLPVVFYLSSFLHSEQKKRKLILPKRLKSSTSFANIQENSN

SEQ ID NO: 183 - DNA, 3242 bp, Homo sapiens
  CDS (286)..(921)
atatgtggtgttgacagaacacaatacagggctattcggatctcacctcggactcactttcgcccaatttctgcatccgaactgtccccaggaggaggaagcgagtcagaatttgaatctgagaaagatgaagcaaatattcccattccttctcaagttgatatatttgaagatccgcaggcagatctcaaacctttggaagaagatgcagagaaagaaggccattactatggaaaatcagagcttgagtctggaaaattccttcccgggttaaaaaaatctgggatggaaaagagtgctcagacatcactggattcccaggaggaatcaactgggattctttcagtaggaaagcaaaatcagtgtttggaatgtagcatgaatgaatccctggaaatagatttagaaagctcagaagcaaattgtaaaataatggcacaatgcgaggaagaaattaataatttttgtggttgcaaagcaggttgtcagtttcctgcttatgaagataatccagtttcttcgggacagctggaagagttccctgtattgaacactgatatacaaggaatgaatagaagtcaagaaaaacagacctggtgggaaaaagccttgtactctcctctttttcctgcatcagagtgtgaagaatgttacacaaatgccaagggagagagtggtttagaagaatatccagatgctaaagagacacccagtaatgaagagcgcctgttagattttaatagggtgtcttctgtttatgaagcaagatgtacaggagagagagattctggagcaaagtcagatggcttccgcggaaaggtgtgctccagcgccagctccacctcggaagagacaggctcagaaggcggaggcgagtgggtgggccctagtgaagaggagctcttttctcgaactcatctctaaacctgcaaaatagtacaaattattgtttaaaaatgatatgtgatggaaaattactcttcagtgagacctgttaatctaaaacaacaacttaggtttcctcttcaattaactgattcagattggtaataattatctttctcttcttgcttattttagagttgaggacagctatcctgttaaagattttttttcccagctgttaaattcttggctatttgaaatagactagattgtgttgtcaaatcaagaatgggtgtgcatgtgcttgtcttagaagtatcactgctttttgcatcttaactgcagttaattttccttccgactgcggttatatcactatgaccttactagcattgcagtgtcaacaaccacttctgctcttcagagacttcagctttggagcatttaggctttgttctccaagaactgggatatccattcttaccctacagtggcttgatgcctttctgaaggcgagagggaagcctgggtgactcagcggtggtctccattcagcaaaatctcatgtacatttccagtaggaaccgcagaggtgtgcttttcaagactcaccaaatactgtgttttctctcttaggatttcttttcccctaaagtatcacggaagatactatggttcgtgactttcctgctctcatactgcagttacatttacaccaaaaccccatgcagggttctttgtggtgagtgttccatacgtgctaaggaccttagttgcagattgttactttctggtgacctatgttgaattgaaacccccaaaacttgaaattgtgaacatttgacatgcagtaaaggccacctcatcacccagagaaatctttggctgctgcagctagccgcttcttggctgtgatgtagtatagcttcgatctcattttgtgtttgagagaatgttctgggcaagttctgtgtgtggtgggttggggcgggtagagtcatgagttttccacatccctgtgtggtggttttgctgactgtcgctccgtgggactggctcccgtttctccttggtgagcccggggagccggcgcatcttgtgagtcgcgtctgtgcatggcgatccgctcctccggctctcatggcattgtgccacaggcagaggccaggaggagcagtatgtgcacagccgaaacattttacattttttacattgtttttcttttttaaccaactcattgtttaaaaaacaaaaacaaaaaaaacctaatctgtgaaatcagcgcagcatgcctggagcatcaggaatggcagaaaagtctgatgcgctctagacagcttcaccactcatttgggcaggcagtaaacacacatataatttattagctgggagctgaactggctgtgaaatctatgatttgctttgaacatttgggttttgttgcctttttcttaattgataacacagaaaagaaagtaccatcaaagactgtggagtcattgagggtctgtgtgtcctcaccgagagggacctggtgtgcccgccgggtcgatcttcccacgtgttagggtttatttttatacaacacatcttttgacactttaaggtgggtgggtgtgtgtgtgtgtgtgtgtgtgcgcgcgtgcgcgcgcgcatgtgtaaggttttatgttgctgttatttatttacgaacttcagatacgtttttatgtatttttcattcttctggagcttcctaaaaattgataagcatctgcactgaaatataatttaacagcaaaagtaaaaaaggattgaaagttgtaaattcctcatatcactacagtgacgattattctagaaatcgttgcttgtgtagcaaagaccaaataaatagatttcagacacaaccttgagcacagttgattttggacagctgctgtttattaggaaagggctccaggtggcaaaggtgcacacttcctcagacacaggtgagaagatgcagcaccttccacaggtgaatgggacggattcgaagtgagcaaagggattcacaaattatgtatttatttgttttcatagttaagtagctgaagctcagaggctttcagcaacagagatgaaagtgtggctttttagttttgtgaatggatgatcacaaagaaaaagcatttttaaaaagttggcaaacgctgaaacgcactgtggtatgaagcgcattgcatttccatagcactgaagtaccagtttccattcctgggctgagattgtttttcccgtggttgtattgttctgatttcacgtacaccagagtaactgatttttttttgtttgttttcttgtggagttaacaccaaataaaaattgtaaaaaac

SEQ ID NO: 184 - protein, 212 aa, Homo sapiens
MEKSAQTSLDSQEESTGILSVGKQNQCLECSMNESLEIDLESSEANCKIMAQCEEEINNFCGCKAGCQFPAYEDNPVSSGQLEEFPVLNTDIQGMNRSQEKQTWWEKALYSPLFPASECEECYTNAKGESGLEEYPDAKETPSNEERLLDFNRVSSVYEARCTGERDSGAKSDGFRGKVCSSASSTSEETGSEGGGEWVGPSEEELFSRTHL

SEQ ID NO: 185 - DNA, 3242 bp, Homo sapiens
  CDS (286)..(921)
atatgtggtgttgacagaacacaatacagggctattcggatctcacctcggactcactttcgcccaatttctgcatccgaactgtccccaggaggaggaagcgagtcagaatttgaatctgagaaagatgaagcaaatattcccattccttctcaagttgatatatttgaagatccgcaggcagatctcaaacctttggaagaagatgcagagaaagaaggccattactatggaaaatcagagcttgagtctggaaaattccttcccgggttaaaaaaatctgggatggaaaagagtgctcagacatcactggattcccaggaggaatcaactgggattctttcagtaggaaagcaaaatcagtgtttggaatgtagcatgaatgaatccctggaaatagatttagaaagctcagaagcaaattgtaaaataatggcacaatgcgaggaagaaattaataatttttgtggttgcaaagcaggttgtcagtttcctgcttatgaagataatccagtttcttcgggacagctggaagagttccctgtattgaacactgatatacaaggaatgaatagaagtcaagaaaaacagacctggtgggaaaaagccttgtactctcctctttttcctgcatcagagtgtgaagaatgttacacaaatgccaagggagagagtggtttagaagaatatccagatgctaaagagacacccagtaatgaagagcgcctgttagattttaatagggtgtcttctgtttatgaagcaagatgtacaggagagagagattctggagcaaagtcagatggcttccgcggaaagatgtgctccagcgccagctccacctcggaagagacaggctcagaaggcggaggcgagtgggtgggccctagtgaagaggagctcttttctcgaactcatctctaaacctgcaaaatagtacaaattattgtttaaaaatgatatgtgatggaaaattactcttcagtgagacctgttaatctaaaacaacaacttaggtttcctcttcaattaactgattcagattggtaataattatctttctcttcttgcttattttagagttgaggacagctatcctgttaaagattttttttcccagctgttaaattcttggctatttgaaatagactagattgtgttgtcaaatcaagaatgggtgtgcatgtgcttgtcttagaagtatcactgctttttgcatcttaactgcagttaattttccttccgactgcggttatatcactatgaccttactagcattgcagtgtcaacaaccacttctgctcttcagagacttcagctttggagcatttaggctttgttctccaagaactgggatatccattcttaccctacagtggcttgatgcctttctgaaggcgagagggaagcctgggtgactcagcggtggtctccattcagcaaaatctcatgtacatttccagtaggaaccgcagaggtgtgcttttcaagactcaccaaatactgtgttttctctcttaggatttcttttcccctaaagtatcacggaagatactatggttcgtgactttcctgctctcatactgcagttacatttacaccaaaaccccatgcagggttctttgtggtgagtgttccatacgtgctaaggaccttagttgcagattgttactttctggtgacctatgttgaattgaaacccccaaaacttgaaattgtgaacatttgacatgcagtaaaggccacctcatcacccagagaaatctttggctgctgcagctagccgcttcttggctgtgatgtagtatagcttcgatctcattttgtgtttgagagaatgttctgggcaagttctgtgtgtggtgggttggggcgggtagagtcatgagttttccacatccctgtgtggtggttttgctgactgtcgctccgtgggactggctcccgtttctccttggtgagcccggggagccggcgcatcttgtgagtcgcgtctgtgcatggcgatccgctcctccggctctcatggcattgtgccacaggcagaggccaggaggagcagtatgtgcacagccgaaacattttacattttttacattgtttttcttttttaaccaactcattgtttaaaaaacaaaaacaaaaaaaacctaatctgtgaaatcagcgcagcatgcctggagcatcaggaatggcagaaaagtctgatgcgctctagacagcttcaccactcatttgggcaggcagtaaacacacatataatttattagctgggagctgaactggctgtgaaatctatgatttgctttgaacatttgggttttgttgcctttttcttaattgataacacagaaaagaaagtaccatcaaagactgtggagtcattgagggtctgtgtgtcctcaccgagagggacctggtgtgcccgccgggtcgatcttcccacgtgttagggtttatttttatacaacacatcttttgacactttaaggtgggtgggtgtgtgtgtgtgtgtgtgtgtgcgcgcgtgcgcgcgcgcatgtgtaaggttttatgttgctgttatttatttacgaacttcagatacgtttttatgtatttttcattcttctggagcttcctaaaaattgataagcatctgcactgaaatataatttaacagcaaaagtaaaaaaggattgaaagttgtaaattcctcatatcactacagtgacgattattctagaaatcgttgcttgtgtagcaaagaccaaataaatagatttcagacacaaccttgagcacagttgattttggacagctgctgtttattaggaaagggctccaggtggcaaaggtgcacacttcctcagacacaggtgagaagatgcagcaccttccacaggtgaatgggacggattcgaagtgagcaaagggattcacaaattatgtatttatttgttttcatagttaagtagctgaagctcagaggctttcagcaacagagatgaaagtgtggctttttagttttgtgaatggatgatcacaaagaaaaagcatttttaaaaagttggcaaacgctgaaacgcactgtggtatgaagcgcattgcatttccatagcactgaagtaccagtttccattcctgggctgagattgtttttcccgtggttgtattgttctgatttcacgtacaccagagtaactgatttttttttgtttgttttcttgtggagttaacaccaaataaaaattgtaaaaaac

SEQ ID NO: 186 - protein, 212 aa, Homo sapiens
MEKSAQTSLDSQEESTGILSVGKQNQCLECSMNESLEIDLESSEANCKIMAQCEEEINNFCGCKAGCQFPAYEDNPVSSGQLEEFPVLNTDIQGMNRSQEKQTWWEKALYSPLFPASECEECYTNAKGESGLEEYPDAKETPSNEERLLDFNRVSSVYEARCTGERDSGAKSDGFRGKMCSSASSTSEETGSEGGGEWVGPSEEELFSRTHL

SEQ ID NO: 187 - DNA, 6239 bp, Homo sapiens
  CDS (1)..(3834)
cgatctgcttctgatgaaagctctggtatcgagactttagtggaggagctctgctccagactgaaagaccttcagagtaagcaagaagagaagattcacaaaaagttagaggggtctccctctccagaggcagaattatcccctccagcaaaggatcaagtggaaatgtactatgaagcatttccaccactttctgagaaaccagtttgcctgcaagaaatcatgactgtgtggaacaagtctaaagtctgttcttactctagctcttcttcatcatccacagccccaccagctagcacagatacttcctctcctaaggactgcaacagtgaaagtgaagtcaccaaggaaagaagcagtgaagtacccaccactgtgcatgagaaaacccagagcaaaagcaaaaacgagaaggaaaacaaatttagtaatggcacaattgaagaaaagcctgctttgtacaaaaagcaaatccgacataaacctgaaggaaagattcgccctcgctcgtggtcttctggctccagtgaagcaggctcaagttccagtgggaatcagggagaattaaaagcatccatgaagtatgttaaagtaagacacaaggcacgagagattcgaaacaaaaaagggcggaatgggcaaagcaggctttctttgaagcacggtgaaaaggctgaaaggaacattcatactggaagtagtagcagtagcagcagtggttctgtcaaacagctgtgcaagcggggtaagagacctttaaaagaaatagggagaaaagatcctgggagcactgaaggaaaagacctgtacatggagaatagaaaggacacagagtataaagaggagcccttgtggtacaccgagccaattgctgaatattttgttcctctgagcagaaaaagtaaactagagaccacataccgaaacagacaggatacaagtgatctgacatcagaggcagtggaagaattgtctgaatcagtgcatggtctttgtatcagcaacaataatcttcataaaacatacctcgcagcaggtactttcattgatggtcattttgtagaaatgcctgcagttataaatgaggatattgacctcactgggacctcattatgttctctaccagaggacaataaatacctggatgatattcatctatcagaattaacgcacttctatgaagtggatattgatcaatccatgttggatcctggtgcctcagaaacaatgcaaggagaaagtcggattttgaatatgattcgacagaaaagcaaagagaacacagattttgaggcagaatgttgcatagtgttagatggtatggagttgcaaggggaacgtgcaatatggacagattctaccagctccgtaggtgctgagggcttattcctgcaggaccttggcaatctggctcagttttgggagtgctgttcatccagctccggtgatgctgatggggagagttttggaggagactctccagttagactctctcccatcttagacagcacagtgctcaattcacacctgcttgctggcaatcaagagctcttttcagatattaatgaaggatctggtataaactcttgtttttcagtgtttgaagtgcaatgcagtaattctgttttaccattttcttttgaaacactcaacttgggaaatgaaaatacagattctagtgctaatatgcttgggaaaacacagtctagattgctaatatggaccaaaaatagtgcctttgaagaaaatgaacactgttctaatctttcaacaagaacttgtagtccatggtcccattcagaagaaacacgttcagacaatgaaacattaaatattcagtttgaagaatccacacagtttaatgccgaagatattaattatgtagttcctagagtctcgtcaaattatgtagatgaagaacttctagattttttgcaagatgaaacttgccagcaaaacagtagaactttaggtgagattcctacattagttttcaaaaaaacatctaaactagaatccgtctgtggtattcagctagaacaaaaaacagaaaacaaaaattttgaaactacacaagtatgtaatgaaagtccacatggagatggctacagctcaggggttattaaagacatttggacaaagatggcagacacaaattctgtggctacagtagaaatagaaagaactgatgctgagttgttttcggcagatgtaaataactactgctgctgtctagatgctgaagctgaactggagacccttcaggagcctgataaggctgtgcggaggtcagagtaccatctgtgggagggacagaaagagagcctggagaaaagagcatttgcttctagtgagctatcaaacgtggatggtggtgattatacaacaccctctaaaccctgggatgtagcccaagataaagaaaacacattcattcttggaggagtttatggagaactcaaaaccttcaatagtgatggggagtgggcagtcgtaccacctagtcacacaaaaggaagtctgttacagtgtgcagcttctgatgttgtgacgatagctggtacagatgtctttatgaccccaggaaacagttttgctcctgggcacaggcagttatggaaacccttcgtgtcatttgaacagaatgatcagccgaagagtggggaaaatgggttaaataagggattttcttttatcttccatgaagacttactaggagcttgtggcaactttcaagtcgaagatcctggacttgaatactcattttcttcctttgacttaagcaatccattttcacaagttcttcatgtagaatgctcatttgaacctgaagggattgcatctttcagccccagttttaaaccgaaatcaatcctctgttctgattcagacagtgaagtgtttcaccccaggatatgtggtgttgacagaacacaatacagggctattcggatctctcctcggactcactttcgcccaatttctgcatccgaactgtccccaggaggaggaagcgagtcagaatttgaatctgagaaagatgaagcaaatattcccattccttctcaagttgatatatttgaagatccgcaggcagatctcaaacctttggaagaagatgcagagaaagaaggccattactatggaaaatcagagcttgagtctggaaaattccttcccaggttaaaaaaatctgggatggaaaagagtgctcagacatcactggattcccaggaggaatcaactgggattctttcagtaggaaagcaaaatcagtgtttggaatgtagcatgaatgaatccctggaaatagatttagaaagctcagaagcaaattgtaaaataatggcacaatgcgaggaagaaattaataatttttgtggttgcaaagcaggttgtcagtttcctgcttatgaagataatccagtttcttcgggacagctggaagagttccctgtattgaacactgatatacaaggaatgaatagaagtcaagaaaaacagacctggtgggaaaaagccttgtactctcctctttttcctgcatcagagtgtgaagaatgttacacaaatgccaagggagagagtggtttagaagaatatccagatgctaaagagacacccagtaatgaagagcgcctgttagattttaatagggtgtcttctgtttatgaagcaagatgtacaggagagagagattctggagcaaagtcagatggcttccgcggaaagatgtgctccagcgccagctccacctcggaagagacaggctcagaaggcggaggcgagtgggtgggccctagtgaagaggagctcttttctcgaactcatctctaaacctgcaaaatagtacaaattattgtttaaaaatgatatgtgatggaaaattactcttcagtgagacctgttaatctaaaacaacaacttaggtttcctcttcaattaactgattcagattggtaataattatctttctcttcttgcttattttagagttgaggacagctatcctgttaaagattttttttcccagctgttaaattcttggctatttgaaatagactagattgtgttgtcaaatcaagaatgggtgtgcatgtgcttgtcttagaagtatcactgctttttgcatcttaactgcagttaattttccttccgactgcggttatatcactatgaccttactagcattgcagtgtcaacaaccacttctgctcttcagagacttcagctttggagcatttaggctttgttctccaagaactgggatatccattcttaccctacagtggcttgatgcctttctgaaggcgagagggaagcctgggtgactcagcggtggtctccattcagcaaaatctcatgtacatttccagtaggaaccgcagaggtgtgcttttcaagactcaccaaatactgtgttttctctcttaggatttcttttcccctaaagtatcacggaagatactatggttcgtgactttcttgctaactgaagaagccaaggatttggggtgtggggtcgtatgcgagacacagtggggtaagggtgcataccccaccccttacctgctctcatactgcagttacatttacaccaaaaccccatgcagggttctttgtggtgagtgttccatacgtgctaaggaccttagttgcagattgttactttctggtgacctatgttgaattgaaacccccaaaacttgaaattgtgaacatttgacatgcagtaaaggccacctcatcacccagagaaatctttggctgctgcagctagccgcttcttggctgtgatgtagtatagcttcgatctcattttgtgtttgagagaatgttctgggcaagttctgtgtgtggtgggttggggcgggtagagtcatgagttttccacatccctgtgtggtggttttgctgactgtcgctccgtgggactggctcccgtttctccttggtgagcccggggagccggcgcatcttgtgagtcgcgtctgtgcatggcgatccgctcctccggctctcatggcattgtgccacaggcagaggccaggaggagcagtatgtgcacagccgaaacattttacattttttacattgtttttcttttttaaccaactcattgtttaaaaaacaaaaacaaaaaaaacctaatctgtgaaatcagcgtagcatgcctggagcatcaggaatggcagaaaagtctgatgcgctctagacagcttcaccactcatttgggcaggcagtaaacacacatataatttattagctgggagctgaactggctgtgaaatctatgatttgctttgaacatttgggttttgttgcctttttcttaattgataacacagaaaagaaagtaccatcaaagactgtggagtcattgagggtctgtgtgtcctcaccgagagggacctggtgtgcccgccgggtcgatcttcccacgtgttagggtttatttttatacaacacatcttttgacactttaaggtgggtgggtgtgtgtgtgtgtgtgtgtgtgcgcgcgtgcgcgcgcgcatgtgtaaggttttatgttgctgttatttatttacgaacttcagatacgtttttatgtatttttcattcttctggagcttcctaaaaattgataagcatctgcactgaaatataatttaacagcaaaagtaaaaaaggattgaaagttgtaaattcctcatatcactacagtgacgattattctagaaatcgttgcttgtgtagcaaagaccaaataaatagatttcagacacaaccttgagcacagttgattttggacagctgctgtttattaggaaagggctccaggtggcaaaggtgcacacttcctcagacacaggtgagaagatgcagcaccttccacaggtgaatgggacggattcgaagtgagcaaagggattcacaaattatgtatttatttgttttcatagttaagtagctgaagctcagaggctttcagcaacagagatgaaagtgtggctttttagttttgtgaatggatgatcacaaagaaaaagcatttttaaaaagttggcaaacgctgaaacgcactgtggtatgaagcgcattgcatttccatagcactgaagtaccagtttccattcctgggctgagattgtttttcccgtggttgtattgttctgatttcacgtacaccagagtaactgatttttttttgtttgttttcttgtggagttaacaccaaataaaaattgtaaaaaac

SEQ ID NO: 188 - protein, 1278 aa, Homo sapiens
RSASDESSGIETLVEELCSRLKDLQSKQEEKIHKKLEGSPSPEAELSPPAKDQVEMYYEAFPPLSEKPVCLQEIMTVWNKSKVCSYSSSSSSSTAPPASTDTSSPKDCNSESEVTKERSSEVPTTVHEKTQSKSKNEKENKFSNGTIEEKPALYKKQIRHKPEGKIRPRSWSSGSSEAGSSSSGNQGELKASMKYVKVRHKAREIRNKKGRNGQSRLSLKHGEKAERNIHTGSSSSSSSGSVKQLCKRGKRPLKEIGRKDPGSTEGKDLYMENRKDTEYKEEPLWYTEPIAEYFVPLSRKSKLETTYRNRQDTSDLTSEAVEELSESVHGLCISNNNLHKTYLAAGTFIDGHFVEMPAVINEDIDLTGTSLCSLPEDNKYLDDIHLSELTHFYEVDIDQSMLDPGASETMQGESRILNMIRQKSKENTDFEAECCIVLDGMELQGERAIWTDSTSSVGAEGLFLQDLGNLAQFWECCSSSSGDADGESFGGDSPVRLSPILDSTVLNSHLLAGNQELFSDINEGSGINSCFSVFEVQCSNSVLPFSFETLNLGNENTDSSANMLGKTQSRLLIWTKNSAFEENEHCSNLSTRTCSPWSHSEETRSDNETLNIQFEESTQFNAEDINYVVPRVSSNYVDEELLDFLQDETCQQNSRTLGEIPTLVFKKTSKLESVCGIQLEQKTENKNFETTQVCNESPHGDGYSSGVIKDIWTKMADTNSVATVEIERTDAELFSADVNNYCCCLDAEAELETLQEPDKAVRRSEYHLWEGQKESLEKRAFASSELSNVDGGDYTTPSKPWDVAQDKENTFILGGVYGELKTFNSDGEWAVVPPSHTKGSLLQCAASDVVTIAGTDVFMTPGNSFAPGHRQLWKPFVSFEQNDQPKSGENGLNKGFSFIFHEDLLGACGNFQVEDPGLEYSFSSFDLSNPFSQVLHVECSFEPEGIASFSPSFKPKSILCSDSDSEVFHPRICGVDRTQYRAIRISPRTHFRPISASELSPGGGSESEFESEKDEANIPIPSQVDIFEDPQADLKPLEEDAEKEGHYYGKSELESGKFLPRLKKSGMEKSAQTSLDSQEESTGILSVGKQNQCLECSMNESLEIDLESSEANCKIMAQCEEEINNFCGCKAGCQFPAYEDNPVSSGQLEEFPVLNTDIQGMNRSQEKQTWWEKALYSPLFPASECEECYTNAKGESGLEEYPDAKETPSNEERLLDFNRVSSVYEARCTGERDSGAKSDGFRGKMCSSASSTSEETGSEGGGEWVGPSEEELFSRTHL

SEQ ID NO: 189 - DNA, 1625 bp, Homo sapiens
  CDS (17)..(598)
atctaagtactctgaaatgagtgaggaaaaacgagccaaacttcgtgaaattgagctcaaagttatgaagtttcaggatgaattggaatctgggaaaagacctaaaaaaccaggccagagttttcaggagcaagtagaacactacagagataaacttcttcaacgagagaaagagaaagagttagaaagagaacgagaaagagacaagaaagataaagaaaaattggaatctcgctccaaagacaagaaggaaaaagatgagtgtactccgacaaggaaggaaaggaagaggcgacacagtacatcccccagcccatctcgcagtagcagtggtagacgagtgaaatccccatcaccaaaatcggagcgatcagagcgttcagaaagatctcataaagagagctcacggtccaggtcatctcacaaagattctcctagagatgttagcaaaaaagccaaaagatcaccatctggttcaaggacacctaaaaggtctaggcgatcacggtctagatctcctaaaaaatcaggaaagaagtccagatcccagtccagatctccacacaggtctcataaaaagtcaaagaaaaacaaacactgacgtaaatttttaagatgctgtcacttattggaaatgcgatttgttttgtgcctgaacggtctgttttttaaaaaaacaaaaaatcaaatgaaagagcattcctggggttttttgtttgtttgtgtatgcatgtgtaaactcatgagcaactgcatctgtagatctgtcattgttttatattgtgtaaattactttcattgtggctatttctcaagatgaaatttttattgttctaatggatttcatcagaaatgtgtataatggatctgctgacagtagtagtattttgttttaggatgttgtgacttagcaaaaataatacagatgtcttccccccttttgtagctttgacaatttgaattagatttcaaataaaatctgaacagaaaactataatgttgtttttttgccccaccggtgatattaagtcccttaaagtcctactgagtttcacactactgttgtgcttcttatacctgatgcactttataagccccagtgttcaagtagcttaagttttatatttactaagatgactatccaaattaagggacctgagactcctatttggtggtttgctaaccatttgcttttgataagtttctcttgggtaatactaatacccagatatcaaagactaggtagatatggcatggcgttttgttagtggaatgcctggctaaaacatttttttcacagaagcaatatgatttccatacatccaacccatgttctgagcaactacttacttttagggggaaattaaatatcttttcatttcctcttctattatgaaagaagtttatttgtaaaacaaattttctaacaaggtttggccatagaattctcttgtatgattgttgaccttttataatcttctgtaggctatctttcaaacactggcatcagaatattttttataagtttgtgtttaaacagcttagttggtccccccccccactcccaagagacttgggtttagttatagctttaagtaaaatttaaaaataaaatgtttttcagg

SEQ ID NO: 190 - protein, 194 aa, Homo sapiens
MSEEKRAKLREIELKVMKFQDELESGKRPKKPGQSFQEQVEHYRDKLLQREKEKELERERERDKKDKEKLESRSKDKKEKDECTPTRKERKRRHSTSPSPSRSSSGRRVKSPSPKSERSERSERSHKESSRSRSSHKDSPRDVSKKAKRSPSGSRTPKRSRRSRSRSPKKSGKKSRSQSRSPHRSHKKSKKNKH

SEQ ID NO: 191 - DNA, 6823 bp, Homo sapiens
  CDS (2)..(3085)
ggcggacaaaacgccaggcggatctcagaaggccagttcaaagacgagatcatcagatgttcattcatctggatcttcagatgcacatatggatgcatctggaccctcagatagtgatatgccaagtcggacacgacctaagagcccaagaaaacataattataggaatgaaagtgcccgtgaaagcctttgtgattctcctcatcagaatctctcaagacctcttctggaaaacaaacttaaagcattcagtattggaaaaatgagtacagctaagcgaactttaagtaaaaaggaacaggaagaattaaagaaaaaggaggatgaaaaggcagctgctgagatttatgaggagtttcttgctgcttttgaaggaagtgatggtaataaagtgaaaacatttgtgcgagggggtgttgttaatgcagctaaagaagaacatgaaacagatgaaaaaagaggtaaaatctataagccatcttcaagatttgcagatcaaaaaaatcctccaaatcagtcttccaatgaaagaccaccatctcttcttgtgatagaaaccaaaaaacctccacttaaaaaaggagagaaagaaaagaaaaaaagcaatttggaactcttcaaagaagaattaaagcaaattcaagaggaacgtgatgagagacataaaacaaaaggcagattaagtcgatttgaacctcctcagtcagattctgatggtcagcgtcgttctatggacgcgccttcaagaagaaatagatcatctggtgttcttgatgattacgcacctggctcacatgatgtaggagatccaagcactactaatttataccttggaaacattaatccacagatgaatgaagaaatgctgtgccaagaatttggaagatttggaccgttagccagtgtgaaaatcatgtggcctagaactgatgaagaaagagccagagagagaaattgcggctttgtggcctttatgaatagaagagatgctgaaagagctttaaaaaatttgaatggaaaaatgattatgtcttttgaaatgaagttaggttggggtaaagctgtacctattcctccacatccaatatacattccgccttctatgatggaacatacgcttcccccacctccatccggactgccttttaatgcgcagcctagagagcggttaaaaaaccctaatgctcctatgttaccgccacctaaaaacaaagaggattttgagaagactctgtcgcaagccatagtcaaagtggttatcccaacagaaaggaatttgctcgccctgatacatcgaatgatagagtttgttgtacgtgaagggccaatgtttgaagctatgattatgaacagagaaatcaacaatcctatgttcaggttcttatttgaaaaccagacaccagcccatgtttactataggtggaagctttattctattctgcagggagattctccaactaaatggcggacggaagattttcgtatgttcaaaaatggatctttttggaggccaccaccattaaatccgtacttgcatggaatgtcagaagagcaagaaacagaagcttttgtagaggaacctagtaaaaagggagcacttaaggaagaacagagggataaattggaagaaatcttgcggggattaactccaaggaaaaatgatattggagatgcaatggttttctgtcttaataatgctgaagctgctgaagaaatagtggattgcattactgagtcgttgtccatcttaaagacaccccttcctaaaaagattgccagattatatttggtttctgatgttttgtacaactcttcagccaaagttgctaatgcttcatattatagaaaattttttgaaacaaagttatgtcagatattttcagacctcaatgccacctatcgtacaattcaaggccatttacaatctgaaaactttaagcaacgggtaatgacttgcttcagagcatgggaagattgggcaatttatccagaaccatttttgatcaaactacaaaatattttcttaggacttgtaaatattattgaagaaaaggaaacagaggatgttccagatgaccttgatggtgcccccatcgaggaagagcttgatggtgcacctctggaagatgtagatggaattcctattgatgctactcccatcgatgatcttgatggagtccctataaaaagtcttgatgatgatcttgatggagtgcctttggatgcaactgaagactcaaaaaagaatgagcctatatttaaagttgccccatcaaaatgggaagctgtggatgaatctgaattggaagcacaggctgttacaacttctaaatgggaattatttgaccagcatgaagaatcagaagaagaagaaaatcaaaatcaagaagaagaaagtgaagatgaagaagatactcaaagttccaaatctgaagaacatcatttgtactctaatccaatcaaagaagaaatgactgagtctaagttctctaagtactctgaaatgagtgaggaaaaacgagccaaacttcgtgaaattgagctcaaagttatgaagtttcaggatgaattggaatctgggaaaagacctaaaaaaccaggccagagttttcaggagcaagtagaacactacagagataaacttcttcaacgagagaaagagaaagagttagaaagagaacgagaaagagacaagaaagataaagaaaaattggaatctcgctccaaagacaagaaggaaaaagatgagtgtactccgacaaggaaggaaaggaagaggcgacacagtacatcccccagcccatctcgcagtagcagtggtagacgagtgaaatccccatcaccaaaatcggagcgatcagagcgttcagaaagatctcataaagagagctcacggtccaggtcatctcacaaagattctcctagagatgttagcaaaaaagccaaaagatcaccatctggttcaaggacacctaaaaggtctaggcgatcacggtctagatctcctaaaaaatcaggaaagaagtccagatcccagtccagatctccacacaggtctcataaaaagtcaaagaaaaacaaacactgacgtaaatttttaagatgctgtcacttattggaaatgcgatttgttttgtgcctgaacggtctgttttttaaaaaaacaaaaaatcaaatgaaagagcattcctggggttttttgtttgtttgtgtatgcatgtgtaaactcatgagcaactgcatctgtagatctgtcattgttttatattgtgtaaattactttcattgtggctatttctcaagatgaaatttttattgttctaatggatttcatcagaaatgtgtataatggatctgctgacagtagtagtattttgttttaggatgttgtgacttagcaaaaataatacagatgtcttccccccttttgtagctttgacaatttgaattagatttcaaataaaatctgaacagaaaactataatgttgtttttttgccccaccggtgatattaagtcccttaaagtcctactgagtttcacactactgttgtgcttcttatacctgatgcactttataagccccagtgttcaagtagcttaagttttatatttactaagatgactatccaaattaagggacctgagactcctatttggtggtttgctaaccatttgcttttgataagtttctcttgggtaatactaatacccagatatcaaagactaggtagatatggcatggcgttttgttagtggaatgcctggctaaaacatttttttcacagaagcaatatgatttccatacatccaacccatgttctgagcaactacttacttttagggggaaattaaatatcttttcatttcctcttctattatgaaagaagtttatttgtaaaacaaattttctaacaaggtttggccatagaattctcttgtatgattgttgaccttttataatcttctgtaggctatctttcaaacactggcatcagaatattttttataagtttgtgtttaaacagcttagttggtccccccccccactcccaagagacttgggtttagttatagctttaagtaaaatttaaaaataaaatgtttttcaggaaacttcgtatctaatggtttgtaaattcaaggtgcaaaaagttgatttaaaccatttgcagagttgaactctattatgaaaataaatttgctacggtatgaggaagaaataaaacttgtgtaatgttggtcataatactgctataaatataataaagggttatgtagaattgaactgacactattatttgtgaatcttgatttcagttttttatgtaggcacttcatacactggtttgatgggttttttttttcctccctaaaagagaaagtagaaaactattctaacaatggattattttgatttagcttgctttttaaaaaaatcttttcaacttgttttacttaatcttgcctagtcacaaaataagatgtgcacccatggtttggagagttcctatattagctgagcagtgagatacactatttccaaacggtgcacacctacagtagctttggaaatgagccaatcactgttttacttaatggttcttatcagcatgcaaatattgcttgaaagttatttccttattcactgttttgttagtccattttgttaggaaacattaattcctaaaaatttgttcagaataattaaaagtgaacatttggtgctgatactcaaaaacctacaaatgtagccatttaaaaagtaacatgtttttctcccctgctcattgcctgggagaatggaattttatataactacctttctttgcaaaaataacggtcgtgtcgagttggtggtgattttggcattccatcttgcactggtttctagtataggcttagaaataattggtcaggtaataatctttccagtcaagttgcaagggatgcttatttctcttcaaaaaaagacatcctgcgggattgagtagaaaattttaggtcagttttgggtgcttatttgtaatatttttcctactacattggagtttagcagttctttttttctggatccagatacaagtgtcatggtttatcttacagtgggtgaaactgactttcttttggttgggtgggtgaggatttcttaggcctgatagaatatatattctgtgaagtttgttaatgtacatattagattgtattggatttttttttcttgaattgcaaatggtattattagataggttatttccagttttacttcatgacaaattacctagagtaaacctacttaatactccaatggattctatgaaagtttaatgggatcagaaattggtgacttataagggggaagatattctaccatatttttataatagcttattattcatgtttcttgtctgaaggacactcaagttacagagcaaaatttctataggttgactagaatgttcataagcatggtcttccagttgcaggaaagatcatgttctatctgtggacacttactgtcctctaccacagctacgtgccagagttgttttccacagttcttataaagggcatgacttaggctctttaccctccaacttaatgtttatacacagggattgtttactaggttaatgacatttaactcccctctcttctgtaggtgagagaaaataagtaagtcttgatctgtttcttaccaaagagagacagacctatgatggaaaatgatcacgtctctgaattttttctttaacgttatagttccttattacagatagtaagcatatgggaatttctgagctataacatgttgagaagttagaaattaaaactaacacaacaaaaggcgctgaatcaaaagatctttgcttttatttggctcagaatgtttttggcttttctgctaaagatggcagaaattactctacacagacctgatttttctttattgcagaccattcttgtgggcttaccctgagacttttatcccaattagtgaatcttggagggaatacttgcttatttatgacttaggtatttccccccaaactttaatattcttgagcacttgaaaatacttttgagaaattttaactgtgattaaatttaggtttattagaaatattctgtacacatttgcctccatggtggtgtaagttctgaaaaattatatgaccgtgacaatagtttatcatcatcattattgttattcaaaataagggtaaataaatctctgtattgccaaagtgacttaaactgttctgatgaccacacagtgtgatttctttagcagagaaagttggttttaaaaataaatagtaccacttttctaagactgtacagtttacaaataaggtttttttctttgttgttttcctcttctattaagttttagtgaaaagcctaattacagaaaattgtgcagatactagtgaagatactagtataagtttaaaggaacatgtgactgtaaaatctcacatttacaaagtgcttgatctcttcatatttcacacgcatgttttagaatagattttagggagtgtttaattcattatccttttgacttaaaatttttgttaccaacttcctaggacttagataatatataaataagtacaaatcccaggggaagtgttgtgatgctagactaaaaggtgggaatgtgctgctgttccgtgagccttgttccattgttgaaaatttgatgcctcagtgtttattcagtaccacctcatggagcttcaatgtaaatggattatatgtataattggtaatttgtatagttttgtagattgtagattaaatgcactcatcatgtc

SEQ ID NO: 192 - protein, 1028 aa, Homo sapiens
ADKTPGGSQKASSKTRSSDVHSSGSSDAHMDASGPSDSDMPSRTRPKSPRKHNYRNESARESLCDSPHQNLSRPLLENKLKAFSIGKMSTAKRTLSKKEQEELKKKEDEKAAAEIYEEFLAAFEGSDGNKVKTFVRGGVVNAAKEEHETDEKRGKIYKPSSRFADQKNPPNQSSNERPPSLLVIETKKPPLKKGEKEKKKSNLELFKEELKQIQEERDERHKTKGRLSRFEPPQSDSDGQRRSMDAPSRRNRSSGVLDDYAPGSHDVGDPSTTNLYLGNINPQMNEEMLCQEFGRFGPLASVKIMWPRTDEERARERNCGFVAFMNRRDAERALKNLNGKMIMSFEMKLGWGKAVPIPPHPIYIPPSMMEHTLPPPPSGLPFNAQPRERLKNPNAPMLPPPKNKEDFEKTLSQAIVKVVIPTERNLLALIHRMIEFVVREGPMFEAMIMNREINNPMFRFLFENQTPAHVYYRWKLYSILQGDSPTKWRTEDFRMFKNGSFWRPPPLNPYLHGMSEEQETEAFVEEPSKKGALKEEQRDKLEEILRGLTPRKNDIGDAMVFCLNNAEAAEEIVDCITESLSILKTPLPKKIARLYLVSDVLYNSSAKVANASYYRKFFETKLCQIFSDLNATYRTIQGHLQSENFKQRVMTCFRAWEDWAIYPEPFLIKLQNIFLGLVNIIEEKETEDVPDDLDGAPIEEELDGAPLEDVDGIPIDATPIDDLDGVPIKSLDDDLDGVPLDATEDSKKNEPIFKVAPSKWEAVDESELEAQAVTTSKWELFDQHEESEEEENQNQEEESEDEEDTQSSKSEEHHLYSNPIKEEMTESKFSKYSEMSEEKRAKLREIELKVMKFQDELESGKRPKKPGQSFQEQVEHYRDKLLQREKEKELERERERDKKDKEKLESRSKDKKEKDECTPTRKERKRRHSTSPSPSRSSSGRRVKSPSPKSERSERSERSHKESSRSRSSHKDSPRDVSKKAKRSPSGSRTPKRSRRSRSRSPKKSGKKSRSQSRSPHRSHKKSKKNKH

SEQ ID NO: 193 - DNA, 1731 bp, Homo sapiens
  CDS (292)..(1443)
ggaaaatatgaacaagctattcagtgctatactgaggctattagcttgtgccctacagagaagaatgttgacctttctacattttatcaaaacagagctgctgcctttgaacagttgcaaaaatggaaagaagtggcacaagactgtacaaaagctgttgaacttaatcccaaatatgtgaaagctctctttagacgtgcaaaagcccatgagaagctagacaataagaaggaatgtttagaagatgtcactgctgtgtgtatattagaagggttccaaaatcaacaaagcatgctgttagccgataaagttcttaaactccttggaaaagagaaagccaaagaaaaatataagaatcgtgaacctctgatgccatctccacagtttatcaaatcttacttcagttctttcacggatgatatcatttcccagcccatgcttaaaggagagaaatctgatgaagataaagacaaggaaggggaggctttagaagtgaaagaaaattctggatacttaaaggccaaacagtatatggaagaagaaaactacgataaaatcataagtgaatgctcaaaagaaatagatgctgaaggcaaatacatggcagaagcattgctactacgagctaccttctacctgcttattggcaatgccaatgcagccaaaccagatttagataaagtcatcagtttgaaagaagctaatgtgaagcttcgagcaaatgctctcatcaaaagaggcagcatgtacatgcaacagcagcagcctttgctgtccactcaagattttaacatggctgctgacatcgatcctcagaatgcagatgtttatcaccaccgaggacagctgaaaatactccttgatcaagttgaagaagcagtggcagattttgatgaatgtattaggttaagacctgagtctgctctggcacaagcacagaaatgttttgcattgtaccgccaggcatatacgggaaacaactcttcacaaatccaagcagctatgaaaggttttgaagaggtcataaagaaatttccaaggtgtgccgaaggctatgcactatacgcccaggcattaacagatcaacaacagtttggtaaagctgatgaaatgtatgataaatgtattgatttggaaccagataatgctacaacatatgttcataaaggtttacttcaacttcagtggaagcaagatctggatagaggtttggaacttatcagcaaggctattgaaattgacaataaatgtgattttgcctatgaaaccatgggaactattgaagtacaaagaggaaacatggagaaagccattgacatgttcaacaaagctattaacctggccaaatcggaaatggagatggcccatctgtattcactttgcgatgccgcccatgcccagacagaagttgcaaagaaatacggattaaaaccaccaacattataaaacagggggaaagcagactgaccctctttttaaaagtttaccccctcttcaactgaaccctaaagacactgtcatgaactgtgttgaatggtggaaatcagtatttctgtttgtggtgttgttatttgttacatctgtttcatgtctaggtgttgtgggtgtggctgttgaaggaagtttgcagtcttgcagcttttattccctctgcaacaaaagattagaacatgttaaagggatttttaaataaagttgcaaagagtacaaatgataattggccatgcaaat

SEQ ID NO: 194 - protein, 384 aa, Homo sapiens
MLLADKVLKLLGKEKAKEKYKNREPLMPSPQFIKSYFSSFTDDIISQPMLKGEKSDEDKDKEGEALEVKENSGYLKAKQYMEEENYDKIISECSKEIDAEGKYMAEALLLRATFYLLIGNANAAKPDLDKVISLKEANVKLRANALIKRGSMYMQQQQPLLSTQDFNMAADIDPQNADVYHHRGQLKILLDQVEEAVADFDECIRLRPESALAQAQKCFALYRQAYTGNNSSQIQAAMKGFEEVIKKFPRCAEGYALYAQALTDQQQFGKADEMYDKCIDLEPDNATTYVHKGLLQLQWKQDLDRGLELISKAIEIDNKCDFAYETMGTIEVQRGNMEKAIDMFNKAINLAKSEMEMAHLYSLCDAAHAQTEVAKKYGLKPPTL

SEQ ID NO: 195 - DNA, 4017 bp, Homo sapiens
  CDS (92)..(1915)
tttccttccctccctcggtcttccttcgcacgctgtttggtgattgtggcgctcgcgacagacagggaggcggtggcagaggacacttgtcatggccgcctctaaacctgtggaggcagcggtggtcgcagccgctgtaccgagctccgggagtggggtgggcggcggcgggactgcgggcccgggcacgggggggctgccgcgatggcagctggctctggcggtcggggcacccctgctgctgggcgcgggtgccatatacctgtggagtcggcagcaacggcgccgggaggccagaggccggggcgacgccagcggcctgaagcgcaacagcgaacggaagaccccggagggcagggccagtccggccccgggcagcggacaccctgaaggtcccggtgctcacttggacatgaactctcttgatagagcccaagcagccaagaataaaggcaataaatattttaaagcaggaaaatatgaacaagctattcagtgctatactgaggctattagcttgtgccctacagagaagaatgttgacctttctacattttatcaaaacagagctgctgcctttgaacagttgcaaaaatggaaagaagtggcacaagactgtacaaaagctgttgaacttaatcccaaatatgtgaaagctctctttagacgtgcaaaagcccatgagaagctagacaataagaaggaatgtttagaagatgtcactgctgtgtgtatattagaagggttccaaaatcaacaaagcatgctgttagccgataaagttcttaaactccttggaaaagagaaagccaaagaaaaatataagaatcgtgaacctctgatgccatctccacagtttatcaaatcttacttcagttctttcacggatgatatcatttcccagcccatgcttaaaggagagaaatctgatgaagataaagacaaggaaggggaggctttagaagtgaaagaaaattctggatacttaaaggccaaacagtatatggaagaagaaaactacgataaaatcataagtgaatgctcaaaagaaatagatgctgaaggcaaatacatggcagaagcattgctactacgagctaccttctacctgcttattggcaatgccaatgcagccaaaccagatttagataaagtcatcagtttgaaagaagctaatgtgaagcttcgagcaaatgctctcatcaaaagaggcagcatgtacatgcaacagcagcagcctttgctgtccactcaagattttaacatggctgctgacatcgatcctcagaatgcagatgtttatcaccaccgaggacagctgaaaatactccttgatcaagttgaagaagcagtggcagattttgatgaatgtattaggttaagacctgagtctgctctggcacaagcacagaaatgttttgcattgtaccgccaggcatatacgggaaacaactcttcacaaatccaagcagctatgaaaggttttgaagaggtcataaagaaatttccaaggtgtgccgaaggctatgcactatacgcccaggcattaacagatcaacaacagtttggtaaagctgatgaaatgtatgataaatgtattgatttggaaccagataatgctacaacatatgttcataaaggtttacttcaacttcagtggaagcaagatctggatagaggtttggaacttatcagcaaggctattgaaattgacaataaatgtgattttgcctatgaaaccatgggaactattgaagtacaaagaggaaacatggagaaagccattgacatgttcaacaaagctattaacctggccaaatcggaaatggagatggcccatctgtattcactttgcgatgccgcccatgcccagacagaagttgcaaagaaatacggattaaaaccaccaacattataaaacagggggaaagcagactgaccctctttttaaaagtttaccccctcttcaactgaaccctaaagacactgtcatgaactgtgttgaatggtggaaatcagtatttctgtttgtggtgttgttatttgttacatctgtttcatgtctaggtgttgtgggtgtggctgttgaaggaagtttgcagtcttgcagcttttattccctgtgcaacaaaagattagaacatgttaaagggatttttaaataaagttgcaaagagtacaaatgataattggccatgcaaataaaaactgatttgttgattttttttttaaggggggttggcagttgattatgttctggatgattccgtctatatatgtgtgaataatgtaagtattttacagcatgttgatttttaaattaacgtagtaaatgctgtaaaatagatttatattcagttaaccgctttcagttgattttttgaaagaaacaaaggttaaatgggggattaaagtaaaattgagagaccctttaaaccattgtcagcatgcacaatgcctctgattctgcagttttagaaacttggtggcacttattaatcctcttggcccctttccactctaatggatagtgtacattcttcttaaagtccacaacagcagattttcttgcagtaaattatgcagatgcaaaatattctaattgatatatgtgttggaagactgagtattgatgggggagtggaccagacaaagaggtaagatgaaacagtagtgtgtttataattgtctgtgactattttctataataattagtactatttaatggtgagcttttaaaaatgtaggatagagggtacagtggcactgtatatactatttatagtctcagctactagggaggctgaggcaagaggcttgagaccaggagctcgaggctgtaatgtgccatgatgattgcacctgcgaatagccactgcactccagcctgggcaatatagcaagaccccatcctttaaaaaattttagaacttttttaaaatcaaagtgcagattgcttgtatgtaaaacccaaataaaggtagagtaagtgtgatatatgggagtattaaaatagcttaaaatttctcgtgaaggacatgtggctaaagggtcaaaaaggatgtaagacttggagccagagcatagtatttcctgaaataacaagtttagtgctttaactatggctacatgtgcttaaggaattttgagccacttatttttgaagatgctgaggacatgtagagtgctttttgtagtgagctaaccttgatctctaaggactaactacccaggtccaggtcttcactaggggtactgacagtgtttaagctttactccacctccttacttagaaatcactttacgatttatttccattttccacttttatagaccatccttttgcttatatgctagatttttctggtgagggaagggttgtgttcttcaggggtcttttgttttgaaatactcaggatggggagaggtttatttaagaacgaattataattatggtttacactgttgggagtaaaggagcatttttacaccccttaagggtgcttaattctgttgaaaccaaaaagatttgtctacaaatgctatcttttttagaaactattagaaatgactccctttcaaagtcaatctttggaaaatattgaggaggtcactaattagttggtgcagttaatataattcaagatgatttggatgatgggaagtttgagaccgctgcattttgtttttaaattatgcaccttctgataacccccaaatacagaaatgttctacatctctgaatgacctctgactttaaaaaagtttttatttgcatggctgtatttacattaacactgacattttcttctactcttctcccttctttcatcttggggttgggtagagaaacacaaaggaaactgaagcatgtgccattctatactgtcattccaaattctcatggactattgcctgttgtgaaaatgtttgaaactgcactgaaagctgcatctgtctgtatctttcttttgtaaatgacctcacatgtaaattcaccaaataaatattacattc

SEQ ID NO: 196 - protein, 608 aa, Homo sapiens
MAASKPVEAAVVAAAVPSSGSGVGGGGTAGPGTGGLPRWQLALAVGAPLLLGAGAIYLWSRQQRRREARGRGDASGLKRNSERKTPEGRASPAPGSGHPEGPGAHLDMNSLDRAQAAKNKGNKYFKAGKYEQAIQCYTEAISLCPTEKNVDLSTFYQNRAAAFEQLQKWKEVAQDCTKAVELNPKYVKALFRRAKAHEKLDNKKECLEDVTAVCILEGFQNQQSMLLADKVLKLLGKEKAKEKYKNREPLMPSPQFIKSYFSSFTDDIISQPMLKGEKSDEDKDKEGEALEVKENSGYLKAKQYMEEENYDKIISECSKEIDAEGKYMAEALLLRATFYLLIGNANAAKPDLDKVISLKEANVKLRANALIKRGSMYMQQQQPLLSTQDFNMAADIDPQNADVYHHRGQLKILLDQVEEAVADFDECIRLRPESALAQAQKCFALYRQAYTGNNSSQIQAAMKGFEEVIKKFPRCAEGYALYAQALTDQQQFGKADEMYDKCIDLEPDNATTYVHKGLLQLQWKQDLDRGLELISKAIEIDNKCDFAYETMGTIEVQRGNMEKAIDMFNKAINLAKSEMEMAHLYSLCDAAHAQTEVAKKYGLKPPTL

SEQ ID NO: 197 - DNA, 859 bp, Homo sapiens
  CDS (1)..(858)
atgacatctggcttgatggggcatagccagttgaccaccattgatcagtcagaactgagttcccagctgggtttgagcctagggggtggcaccatcctgccacctgcccagtcacctgaagatcgtctttcaaccaccccttcacctactagttcacttcacgaggatggtgttgaggatttccggaggcaacttcccagccagaagacagtcgtggtggaagcagggaaaaagcagaaggccccaaagaagagaaaaaagaaagatcctaatgaacctcagaaaccagtttcagcatatgctttattctttcgtgatacacaggctgccatcaagggacagaatcctaatgccacttttggtgaggtttcaaaaattgtggcctccatgtgggatagtcttggagaggagcaaaaacaggtatataagaggaaaactgaggctgccaagaaagagtatctgaaggcactggctgcttacaaagacaaccaggcatcttctggagctgggggtcagcccaatatcaccaagttgattattaccaaacaaatgttgccctcttctattactatgtctcaaggagggatggttactgttatcccagccacagtggtgacctcccgagggctccaactaggccaaaccagtacagctactatccagcccagtcaacaagcccagattgtcactcggtcagtgttgcaggcagcagcagctgctgctgctgctgcttctatgcaactgcctccaccccgactacagccccctccattacaacagatgccacagcccccgactcagcagcaagttaccattctgcagcagcctcctccactccaggccatgcaacagcctccac

SEQ ID NO: 198 - protein, 286 aa, Homo sapiens
MTSGLMGHSQLTTIDQSELSSQLGLSLGGGTILPPAQSPEDRLSTTPSPTSSLHEDGVEDFRRQLPSQKTVVVEAGKKQKAPKKRKKKDPNEPQKPVSAYALFFRDTQAAIKGQNPNATFGEVSKIVASMWDSLGEEQKQVYKRKTEAAKKEYLKALAAYKDNQASSGAGGQPNITKLIITKQMLPSSITMSQGGMVTVIPATVVTSRGLQLGQTSTATIQPSQQAQIVTRSVLQAAAAAAAAASMQLPPPRLQPPPLQQMPQPPTQQQVTILQQPPPLQAMQQPP

SEQ ID NO: 199 - DNA, 1039 bp, Homo sapiens
  CDS (1)..(1038)
atgacatctggcttgatggggcatagccagttgaccaccattgatcagtcagaactgagttcccagctgggtttgagcctagggggtggcaccatcctgccacctgcccagtcacctgaagatcgtctttcaaccaccccttcacctactagttcacttcacgaggatggtgttgaggatttccggaggcaacttcccagccagaagacagtcgtggtggaagcagggaaaaagcagaaggccccaaagaagagaaaaaagaaagatcctaatgaacctcagaaaccagtttcagcatatgctttattctttcgtgatacacaggctgccatcaagggacagaatcctaatgccacttttggtgaggtttcaaaaattgtggcctccatgtgggatagtcttggagaggagcaaaaacaggtatataagaggaaaactgaggctgccaagaaagagtatctgaaggcactggctgcttacaaagacaaccaggagtgtcaggccactgtggaaacagtggaattggatccagcaccaccatcacaaactccttctccacctcctatggctactgttgacccagcatctccagcaccagcttcaatagagccccctgccctgtccccatccattgttgttaactccaccctctcatcctatgtggcaaaccaggcatcttctggagctgggggtcagcccaatatcaccaagttgattattaccaaacaaatgttgccctcttctattactatgtctcaaggagggatggttactgttatcccagccacagtggtgacctcccgagggctccaactaggccaaaccagtacagctactatccagcccagtcaacaagcccagattgtcactcggtcagtgttgcaggcagcagcagctgctgctgctgctgcttctatgcaactgcctccaccccgactacagccccctccattacaacagatgccacagcccccgactcagcagcaagttaccattctgcagcagcctcctccactccaggccatgcaacagcctccac

SEQ ID NO: 200 - protein, 346 aa, Homo sapiens
MTSGLMGHSQLTTIDQSELSSQLGLSLGGGTILPPAQSPEDRLSTTPSPTSSLHEDGVEDFRRQLPSQKTVVVEAGKKQKAPKKRKKKDPNEPQKPVSAYALFFRDTQAAIKGQNPNATFGEVSKIVASMWDSLGEEQKQVYKRKTEAAKKEYLKALAAYKDNQECQATVETVELDPAPPSQTPSPPPMATVDPASPAPASIEPPALSPSIVVNSTLSSYVANQASSGAGGQPNITKLIITKQMLPSSITMSQGGMVTVIPATVVTSRGLQLGQTSTATIQPSQQAQIVTRSVLQAAAAAAAAASMQLPPPRLQPPPLQQMPQPPTQQQVTILQQPPPLQAMQQPP

SEQ ID NO: 201 - DNA, 4174 bp, Homo sapiens
  CDS (33)..(1895)
gggtctgagacggtgggagcggttgtgtgaagatggagtttcccggaggaaatgacaattacctgacgatcacagggccttcgcaccccttcctgtcaggggccgagacattccatacaccaagcttgggtgatgaggaatttgaaatcccacctatctccttggattctgatccctcattggctgtctcagatgtggttggccactttgatgacctggcagacccttcctcttcacaggatggcagtttttcagcccagtatggggtccagacattggacatgcctgtgggcatgacccatggcttgatggagcagggcggggggctcctgagtgggggcttgaccatggacttggaccactctataggaactcagtatagtgccaacccacctgttacaattgatgtaccaatgacagacatgacatctggcttgatggggcatagccagttgaccaccattgatcagtcagaactgagttcccagctgggtttgagcctagggggtggcaccatcctgccacctgcccagtcacctgaagatcgtctttcaaccaccccttcacctactagttcacttcacgaggatggtgttgaggatttccggaggcaacttcccagccagaagacagtcgtggtggaagcagggaaaaagcagaaggccccaaagaagagaaaaaagaaagatcctaatgaacctcagaaaccagtttcagcatatgctttattctttcgtgatacacaggctgccatcaagggacagaatcctaatgccacttttggtgaggtttcaaaaattgtggcctccatgtgggatagtcttggagaggagcaaaaacaggtatataagaggaaaactgaggctgccaagaaagagtatctgaaggcactggctgcttacaaagacaaccaggagtgtcaggccactgtggaaacagtggaattggatccagcaccaccatcacaaactccttctccacctcctatggctactgttgacccagcatctccagcaccagcttcaatagagccccctgccctgtccccatccattgttgttaactccaccctctcatcctatgtggcaaaccaggcatcttctggagctgggggtcagcccaatatcaccaagttgattattaccaaacaaatgttgccctcttctattactatgtctcaaggagggatggttactgttatcccagccacagtggtgacctcccgagggctccaactaggccaaaccagtacagctactatccagcccagtcaacaagcccagattgtcactcggtcagtgttgcaggcagcagcagctgctgctgctgctgcttctatgcaactgcctccaccccgactacagccccctccattacaacagatgccacagcccccgactcagcagcaagttaccattctgcagcagcctcctccactccaggccatgcaacagcctccacctcagaaagttcgaatcaatttacagcaacagcctcctcctctgcagatcaagagtgtgcctctacccactttgaaaatgcagactaccttagtcccaccaactgtggaaagtagtcctgagcggcctatgaacaacagccctgaggcccatacagtggaggcaccttctcctgagactatctgtgagatgatcacagatgtagttcctgaggttgagtctccttctcagatggatgttgaattggtgagtgggtctcctgtggcactctcaccccagcctcgatgtgtgaggtctggttgtgagaaccctcccattgtgagtaaggactgggacaatgaatactgcagcaatgagtgtgtggtgaagcactgcagggatgtattcttggcctgggtagcctctagaaattcaaacacagtggtgtttgtgaaatagtccttcctgttctccaagccagtgaagagttatctgctgggaaagtgtccaagagcctgtttttgaaacacaagctgggcttctggtagtgcctcatcacaacccatgatggctgttcatgtttcaccccttttcttccttcagcagaggccaggctatggagcagggccactgaatttgctgtaatctggagatgctttttactttcaaccataagcggtaatagcagaggaaagggtgaagggagtctgggcaagcaaagcatagagatggtggggtggtggtggggttgaagaaacttgttggtataattgtcataggacttgcctaaaatattattaaaattacgggagtgtactcagctttgagcctaggagaaaatgccactgtgtgcatccattttaaagggttccctcataaaaaaatgttattccccattatcacatcagtacactgctttgaaaacaaaacttttcaacatgggcatactgggctacatggaaaatgacatcacccaggagtgatttctctttatatatattatttctgcagttaccatccttatctgagttatcacagttcatgaatctaagaggcggaactctacatcattagtaagaggttccaccaaagtctaaagttgtattcacttgtgtttgatgaactatctttaaaagaccataggtctatcattatttcttagacataatctaaagaaaaacagactagagaagccacctggttgtaacagaataagcagaagtttacagcatgatagtccaagtggtgataactttaaataaaactcaaatttttactgtttgtagacaggaatgctgtcctagagaacctcctcctcaaccagctacgtacatagttttatcctatgcattcctgttttctgtgttttttgttttttttttttgagacagagtctcgctctgtcacccaggctggagtgcagtggtgcgacctcagctcactgaaacctctgcctcccgggttcaagcgattctcctgcatcagcctcccgagtagctaggattacaggcgcccgccactacgcccagctaatttgtggtatttttagtagagacagggtttcaccatgttggccaggctggtctcgaactcctgacctcatgatccgcccgccttgacctcccaaagtgctgggattacaggcatgagccaccgcacccagcctgcattcctgtttttttaatggttttggagggtagcagtagagatggggtctcactatgttgcccagtctagtcttgaactcctgggctacagttaccctcctacctcggcttcccaaagtgctcggattacaggtgtgagccactgtgcctagcctataatgatcattttaatgtttcccatgcactcatttagtttgaaccttcacagcaacccaatgaggtaatactcccatttcacatataatactgagagatgagttgcacaagattatacactgttaagtagcagagccagaatggacttcagaatcccaactacaatacaaatgtttatttaaataaagaagaaagctattgtacaaatatcactcttcaggtttagcttacagagccatggctatggattcttagctctgtaaggaagtgcttctataaattcttaggtttagagatgataccatctgggtacctttgcttgaaccgtgcaaccacatctgggtctagtaggtggatcccatccagttggtttccaagggtgatcctgaaacagtgtaaaaggaggggcaaaccagaaatcctggaattagagggtttaatattgttaaaaaatgcataccaaatgaagactgcctatcatcatatcaaatatgccaattctaaaaagagcttaacattagaatagtatatggtagaattactagttcagaattggcatagattctggtgttaaaatagactggatctgtattatctgagggttagtaactaatgcttagccaggcctgcttcacagagttgctaccagggagtattctttggataagcaaaatgctagcagcatgtgttttaagctctgttaaggggtgaaagatgtaattattgacagattaaatagataacttcgtaaccaccagggggcagattcaatacatcacagaatggctgaggaagatccttgggttgtgaagagagtagaaaccctagggagcagtgcttttgggtcctagaacctgttgagtttctaatgaatatttgtagaatctcataaaacagtttaaatacaagctt

SEQ ID NO: 202 - protein, 621 aa, Homo sapiens
MEFPGGNDNYLTITGPSHPFLSGAETFHTPSLGDEEFEIPPISLDSDPSLAVSDVVGHFDDLADPSSSQDGSFSAQYGVQTLDMPVGMTHGLMEQGGGLLSGGLTMDLDHSIGTQYSANPPVTIDVPMTDMTSGLMGHSQLTTIDQSELSSQLGLSLGGGTILPPAQSPEDRLSTTPSPTSSLHEDGVEDFRRQLPSQKTVVVEAGKKQKAPKKRKKKDPNEPQKPVSAYALFFRDTQAAIKGQNPNATFGEVSKIVASMWDSLGEEQKQVYKRKTEAAKKEYLKALAAYKDNQECQATVETVELDPAPPSQTPSPPPMATVDPASPAPASIEPPALSPSIVVNSTLSSYVANQASSGAGGQPNITKLIITKQMLPSSITMSQGGMVTVIPATVVTSRGLQLGQTSTATIQPSQQAQIVTRSVLQAAAAAAAAASMQLPPPRLQPPPLQQMPQPPTQQQVTILQQPPPLQAMQQPPPQKVRINLQQQPPPLQIKSVPLPTLKMQTTLVPPTVESSPERPMNNSPEAHTVEAPSPETICEMITDVVPEVESPSQMDVELVSGSPVALSPQPRCVRSGCENPPIVSKDWDNEYCSNECVVKHCRDVFLAWVASRNSNTVVFVK

SEQ ID NO: 203 - DNA, 1876 bp, Homo sapiens
  CDS (75)..(671)
aaataatctcggaaaggcgagaaagaagctgtctccatcttgtctgtatccgctgctcttgtgacgttgtggagatggggagcgtcctggggctgtgctccatggcgagctggataccatgtttgtgtggaagtgccccgtgtttgctatgccgatgctgtcctagtggaaacaactccactgtaactagattgatctatgcacttttcttgcttgttggagtatgtgtagcttgtgtaatgttgataccaggaatggaagaacaactgaataagattcctggattttgtgagaatgagaaaggtgttgtcccttgtaacattttggttggctataaagctgtatatcgtttgtgctttggtttggctatgttctatcttcttctctctttactaatgatcaaagtgaagagtagcagtgatcctagagctgcagtgcacaatggattttggttctttaaatttgctgcagcaattgcaattattattggggcattcttcattccagaaggaacttttacaactgtgtggttttatgtaggcatggcaggtgccttttgtttcatcctcatacaactaatcttacttattgattttgcacattcatggaatgaatcgtgggttgaaaaaatggaagaagggaactcgaaaaatcttataaggttttacccttgatacggaatttacacaggtagggagtgtttagtggacaatagtgtaggttatggatggaggtgtcggtactaaattgaataacgagtaaataatcttacttgggtagagatggcctttgccaacaaagtgaactgttttggttgttttaaactcatgaagtatgggttcagtggaaatgtttggaactctgaaggatttagacaaggttttgaaaaggataatcatgggttagaaggaagtgtttgaaagtcactttgaaagttagttttgggccagcacggtagctcacccttgtaatcccagcactttgggaggctgaggtgggtagattacttgagcccaggaattcaagaccagcctgggcaacatggtgaaaccctgtttctataaaaaataatctgggctttgtagcatatgcctgtggtcccagctactgaggaggctgaggtgggaggattgcttgagcccaggaggcagaggttgcagtgagccaaggtcacgtcactgcactctagcctgggcaacagagtaagacaaaaaaatatatatatattgaaaatcaaaggaggcaaaattttgacagggaaggaagtaactgcaaaacactaggctttagtaggtacttatataaaatctagtccagttctctcatttaaaaaaatgaagacactgaagtacagacttaaatagctcagatagctaattaggaaatttcaagttggccaataatagcattctctctgacatttaaaaataatttctattcaaaatacatgcataattgattttacacctcattactggtggataatttatgtgatgtggattgctggtgtccagcatgacccataaacaggtcagaagaatgatggaatgttttagaataaactcctgcttatagtatactacacagttcaaaagatgtttaaaatgcttttgtatttactgccatgtaattgaaatatatagattattgtaacctttcaacctgaaaatcaagcagtatgagagtttagttatttgtatgtgtcactagtgtctaatgaagcttttaaaatctacaatttcttctttaaaaatatttattaatgtgaatggaatataacaattcagcttaattccccaaccttattctgtgtgtagacattgtattccacaattttgaatggctgtgttttacctctaaataaatgaattcagag

SEQ ID NO: 204 - protein, 199 aa, Homo sapiens
MGSVLGLCSMASWIPCLCGSAPCLLCRCCPSGNNSTVTRLIYALFLLVGVCVACVMLIPGMEEQLNKIPGFCENEKGVVPCNILVGYKAVYRLCFGLAMFYLLLSLLMIKVKSSSDPRAAVHNGFWFFKFAAAIAIIIGAFFIPEGTFTTVWFYVGMAGAFCFILIQLILLIDFAHSWNESWVEKMEEGNSKNLIRFYP

SEQ ID NO: 205 - DNA, 1876 bp, Homo sapiens
  CDS (75)..(671)
aaataatctcggaaaggcgagaaagaagctgtctccatcttgtctgtatccgctgctcttgtgacgttgtggagatggggagcgtcctggggctgtgctccatggcgagctggataccatgtttgtgtggaagtgccccgtgtttgctatgccgatgctgtcctagtggaaacaactccactgtaactagattgatctatgcacttttcttgcttgttggagtatgtgtagcttgtgtaatgttgataccaggaatggaagaacaactgaataagattcctggattttgtgagaatgagaaaggtgttgtcccttgtaacattttggttggctataaagctgtatatcgtttgtgctttggtttggctatgttctatcttcttctctctttactaatgatcaaagtgaagagtagcagtgatcctagagctgcagtgcacaatggattttggttctttaaatttgctgcagcaattgcaattattattggggcattcttcattccagaaggaacttttacaactgtgtggttttatgtaggcatggcaggtgccttttgtttcatcctcatacaactagtcttacttattgattttgcacattcatggaatgaatcgtgggttgaaaaaatggaagaagggaactcgaaaaatcttataaggttttacccttgatacggaatttacacaggtagggagtgtttagtggacaatagtgtaggttatggatggaggtgtcggtactaaattgaataacgagtaaataatcttacttgggtagagatggcctttgccaacaaagtgaactgttttggttgttttaaactcatgaagtatgggttcagtggaaatgtttggaactctgaaggatttagacaaggttttgaaaaggataatcatgggttagaaggaagtgtttgaaagtcactttgaaagttagttttgggccagcacggtagctcacccttgtaatcccagcactttgggaggctgaggtgggtagattacttgagcccaggaattcaagaccagcctgggcaacatggtgaaaccctgtttctataaaaaataatctgggctttgtagcatatgcctgtggtcccagctactgaggaggctgaggtgggaggattgcttgagcccaggaggcagaggttgcagtgagccaaggtcacgtcactgcactctagcctgggcaacagagtaagacaaaaaaatatatatatattgaaaatcaaaggaggcaaaattttgacagggaaggaagtaactgcaaaacactaggctttagtaggtacttatataaaatctagtccagttctctcatttaaaaaaatgaagacactgaagtacagacttaaatagctcagatagctaattaggaaatttcaagttggccaataatagcattctctctgacatttaaaaataatttctattcaaaatacatgcataattgattttacacctcattactggtggataatttatgtgatgtggattgctggtgtccagcatgacccataaacaggtcagaagaatgatggaatgttttagaataaactcctgcttatagtatactacacagttcaaaagatgtttaaaatgcttttgtatttactgccatgtaattgaaatatatagattattgtaacctttcaacctgaaaatcaagcagtatgagagtttagttatttgtatgtgtcactagtgtctaatgaagcttttaaaatctacaatttcttctttaaaaatatttattaatgtgaatggaatataacaattcagcttaattccccaaccttattctgtgtgtagacattgtattccacaattttgaatggctgtgttttacctctaaataaatgaattcagag

SEQ ID NO: 206 - protein, 199 aa, Homo sapiens
MGSVLGLCSMASWIPCLCGSAPCLLCRCCPSGNNSTVTRLIYALFLLVGVCVACVMLIPGMEEQLNKIPGFCENEKGVVPCNILVGYKAVYRLCFGLAMFYLLLSLLMIKVKSSSDPRAAVHNGFWFFKFAAAIAIIIGAFFIPEGTFTTVWFYVGMAGAFCFILIQLVLLIDFAHSWNESWVEKMEEGNSKNLIRFYP

SEQ ID NO: 207 - DNA, 3109 bp, Homo sapiens
  CDS (1)..(1416)
cgagaaagaagctgtctccatcttgtctgtatccgctgctcttgtgacgttgtggagatggggagcgtcctggggctgtgctccatggcgagctggataccatgtttgtgtggaagtgccccgtgtttgctatgccgatgctgtcctagtggaaacaactccactgtaactagattgatctatgcacttttcttgcttgttggagtatgtgtagcttgtgtaatgttgataccaggaatggaagaacaactgaataagattcctggattttgtgagaatgagaaaggtgttgtcccttgtaacattttggttggctataaagctgtatatcgtttgtgctttggtttggctatgttctatcttcttctctctttactaatgatcaaagtgaagagtagcagtgatcctagagctgcagtgcacaatggattttggttctttaaatttgctgcagcaattgcaattattattggggcattcttcattccagaaggaacttttacaactgtgtggttttatgtaggcatggcaggtgccttttgtttcatcctcatacaactagtcttacttattgattttgcacattcatggaatgaatcgtgggttgaaaaaatggaagaagggaactcgagatgttggtatgcagccttgttatcagctacagctctgaattatctgctgtctttagttgctatcgtcctgttctttgtctactacactcatccagccagttgttcagaaaacaaggcgttcatcagtgtcaacatgctcctctgcgttggtgcttctgtaatgtctatactgccaaaaatccaagaatcacaaccaagatctggtttgttacagtcttcagtaattacagtctacacaatgtatttgacatggtcagctatgaccaatgaaccagaaacaaattgcaacccaagtctactaagcataattggctacaatacaacaagcactgtcccaaaggaagggcagtcagtccagtggtggcatgctcaaggaattataggactaattctctttttgttgtgtgtattttattccagcatccgtacttcaaacaatagtcaggttaataaactgactctaacaagtgatgaatctacattaatagaagatggtggagctagaagtgatggatcactggaggatggggacgatgttcaccgagctgtagataatgaaagggatggtgtcacttacagttattccttctttcacttcatgcttttcctggcttcactttatatcatgatgacccttaccaactggtacaggtatgaaccctctcgtgagatgaaaagtcagtggacagctgtctgggtgaaaatctcttccagttggattggcatcgtgctgtatgtttggacactcgtggcaccacttgttcttacaaatcgtgattttgactgagtgagacttctagcatgaaagtcccactttgattattgcttatttgaaaatagtattcccaacttttgtaaagttgtgtatgtttttgcttcccatgtaacttctccagtgttctggcatgaattagattttactgcttgtcattttgttattttcttaccaagtgcattgatatgtgaagtagaatgaattgcagaggaaagttttatgaatatggtgatgagttagtaaaagtggccactattgggcttattctctgctctatagttgtgaaatgaagagtgaaaacaaatttgtttgactattttaaaattatattagaccttaagctgttttagcaagcattaaagcaaatgtatggctgccttttgaaatatttgatgtgttgcctggcaggatactgcaaagaacgtggtttattttaaaatttataaacaagtcacttaaatgccagttgtctgaaaaatcttataaggttttacccttgatacggaatttacacaggtagggagtgtttagtggacaatagtgtaggttatggatggaggtgtcggtactaaattgaataacgagtaaataatcttacttgggtagagatggcctttgccaacaaagtgaactgttttggttgttttaaactcatgaagtatgggttcagtggaaatgtttggaactctgaaggatttagacaaggttttgaaaaggataatcatgggttagaaggaagtgtttgaaagtcactttgaaagttagttttgggccagcacggtagctcacccttgtaatcccagcactttgggaggctgaggtgggtagattacttgagcccaggaattcaagaccagcctgggcaacatggtgaaaccctgtttctataaaaaataatctgggctttgtagcatatgcctgtggtcccagctactgaggaggctgaggtgggaggattgcttgagcccaggaggcagaggttgcagtgagccaaggtcacgtcactgcactctagcctgggcaacagagtaagacaaaaaaatatatatatattgaaaatcaaaggaggcaaaattttgacagggaaggaagtaactgcaaaacactaggctttagtaggtacttatataaaatctagtccagttctctcatttaaaaaaatgaagacactgaagtacagacttaaatagctcagatagctaattaggaaatttcaagttggccaataatagcattctctctgacatttaaaaataatttctattcaaaatacatgcataattgattttacacctcattactggtggataatttatgtgatgtggattgctggtgtccagcatgacccataaacaggtcagaagaatgatggaatgttttagaataaactcctgcttatagtatactacacagttcaaaagatgtttaaaatgcttttgtatttactgccatgtaattgaaatatatagattattgtaacctttcaacctgaaaatcaagcagtatgagagtttagttatttgtatgtgtcactagtgtctaatgaagcttttaaaatctacaatttcttctttaaaaatatttattaatgtgaatggaatataacaattcagcttaattccccaaccttattctgtgtgtagacattgtattccacaattttgaatggctgtgttttacctctaaataaatgaattcagag

SEQ ID NO: 208 - protein, 472 aa, Homo sapiens
RERSCLHLVCIRCSCDVVEMGSVLGLCSMASWIPCLCGSAPCLLCRCCPSGNNSTVTRLIYALFLLVGVCVACVMLIPGMEEQLNKIPGFCENEKGVVPCNILVGYKAVYRLCFGLAMFYLLLSLLMIKVKSSSDPRAAVHNGFWFFKFAAAIAIIIGAFFIPEGTFTTVWFYVGMAGAFCFILIQLVLLIDFAHSWNESWVEKMEEGNSRCWYAALLSATALNYLLSLVAIVLFFVYYTHPASCSENKAFISVNMLLCVGASVMSILPKIQESQPRSGLLQSSVITVYTMYLTWSAMTNEPETNCNPSLLSIIGYNTTSTVPKEGQSVQWWHAQGIIGLILFLLCVFYSSIRTSNNSQVNKLTLTSDESTLIEDGGARSDGSLEDGDDVHRAVDNERDGVTYSYSFFHFMLFLASLYIMMTLTNWYRYEPSREMKSQWTAVWVKISSSWIGIVLYVWTLVAPLVLTNRDFD

SEQ ID NO: 209 - DNA, 2075 bp, Homo sapiens
  CDS (245)..(1279)
taaatggcgagatttgaatgtgataagcagtttactaaaatccttcttcagaaaactccctgagcctctcttcacaaatgataaatatgctgattttattgaagccaatcgtaaagaagatcctctagatcgtctgaaaacattaaaaagactaattcacgatttgcctgaacatcattatgaaacacttaagttcctttcagctcatctgaagacagtggcagaaaattcagaaaaaaataagatggaaccaagaaacctagcaatagtgtttggtcccacccttgttcgaacatcagaagacaacatgacccacatggtcacccacatgcctgaccagtacaagattgtagaaacgctcatccagcaccatgactggtttttcacagaagaaggtgctgaagagcctcttacaacagtgcaggaggaaagcacagtagactcccagccagtgccaaacatagatcatttactcaccaacattggaaggacaggagtctccccaggagatgtatcagattcagctactagtgactcaacaaaatctaagggttcttggggatctggaaaggatcagaaagaagcaccttcgttaactaaagtgtttgatgttatgaaaaaaggaaagtcaactgggagtttactgacacccaccagaggcgaatccgaaaaacaggaacccacatggaaaacgaaaatagcagatcggttaaaactgagacccagagcccctgcggatgacatgtttggagtagggaatcacaaagtgaatgccgagactgctaaaaggaaaagcatccggcgcagacatacactaggagggcacagagatgctaccgaaatcagcgttttgaatttttggaaagtgcatgagcagagcggggagagagaatctgaactttcagctgtaaaccggttaaaaccaaaatgctcagcccaggacctttccatctcagactggctggccagggaacgcctacgcaccagtacctctgaccttagcagaggagaaatcggagatccccagacagagaacccaagcacacgagaaatagccacgaccgacacacctttgtctcttcattgcaacacaggcagttcttccagcaccttggcttcaacaaacaggccccttctttccataccaccacagtcacctgaccaaataaacggagaaagcttccagaacgtgagcaaaaatgctagttctgcagcgaatgcccaacctcataaactgtctgaaaccccaggcagtaaagcagagtttcatccctgtctttaaactgggggtatgtccactctagcaagtaaaaaaactactgttacacgttccagtaactctgtcaatattttcttgtatcagaattgttattatgcagccttcatttgggctggtttcatcatttgcactgtgaaatagctttacagtgcattactacagccagaagaacatatatatatatatatatttaaaaatatatcggatagttgtatacaaatgagcaaggtatttgttgcaacttactacatagcatatacccaaaatcactgaagaaaatcgctggcatcagtgtgcagcaaatttgttcttttggtttcatcactaacaaaagtgcctcatcataaaaatacaggtggtttttagggtgccatattgttaaaattagataacttacttacattgaataaacgaatgcgttttattggtaacagatatcattacatttaccagttttaacacaggtggatacagaacttccattctttagtcattccaggtggatctgagttttatattcaaacttttaatacagtttttgagttttgtgtgacttgaatttttaatctttctgtaaaatacgtaacttaaatgaacatattaaatgtgtatcttttcttcagataccagatttgatataatgttgtaacataggtgtgtagatagtggatcctggatggaactggcttctttatcgagaagaatataattctgcatgaggacttaatgaatccaaacctgtgtcatgcctgtgtgcatacccaattaaacactggaaataaaaattgttttggtg

SEQ ID NO: 210 - protein, 345 aa, Homo sapiens
MEPRNLAIVFGPTLVRTSEDNMTHMVTHMPDQYKIVETLIQHHDWFFTEEGAEEPLTTVQEESTVDSQPVPNIDHLLTNIGRTGVSPGDVSDSATSDSTKSKGSWGSGKDQKEAPSLTKVFDVMKKGKSTGSLLTPTRGESEKQEPTWKTKIADRLKLRPRAPADDMFGVGNHKVNAETAKRKSIRRRHTLGGHRDATEISVLNFWKVHEQSGERESELSAVNRLKPKCSAQDLSISDWLARERLRTSTSDLSRGEIGDPQTENPSTREIATTDTPLSLHCNTGSSSSTLASTNRPLLSIPPQSPDQINGESFQNVSKNASSAANAQPHKLSETPGSKAEFHPCL

SEQ ID NO: 211 - DNA, 4655 bp, Homo sapiens
  CDS (1)..(3858)
cccgatcagcaagtggagactgggaaatccccctctttatctggagcctctgccaagcctgcccctcagtcgagtgaaaacgctggtacttcagatttagaactacctgtcagtcaaaggagtcaagatttaagtttacaagaggctgaaactgagcaatcagatactttagataataaagaagctgtcatcctaagggaaaaacctccatctggacgccagacaccgcagcctttaaggcatcagtcttacatcttggcagtaaatgaccaggagaccgggtcagacactacctgctggctgcccaatgatgcacgtcgagaggtccacataaaaagaatggaggaaagaaaagcctcgagtaccagtccgcctggcgattctttggcttccatcccatttatagatgaaccaactagccctagcattgatcatgatattgcacatatccctgcctctgctgttatatcagcctctacctctcaggtcccctccatagcaacagttcctccttgcctcacaacttcagctccattaattcgccgtcagctctcacatgaccacgaatctgttggccctcctagcctggatgctcagcccaactcaaagacagaaagatcaaaatcatatgatgagggtctggatgattacagagaagatgcaaaattgtcctttaagcacgtatctagtctgaagggaatcaagatcgcagacagccaaaagtcatcagaagactctgggtccagaaaagattcttcctcagaggtcttcagtgatgctgccaaggaagggtggcttcatttccgaccccttgtcaccgataagggcaagcgagttggtggaagtattcggccatggaaacagatgtatgttgtccttcggggtcattcactttacctgtacaaagataaaagagagcagacgactccgtctgaggaagagcagcccatcagtgttaatgcttgcttgatagacatctcttacagtgagaccaagaggaaaaatgtgtttcgactcaccacgtccgactgtgaatgcctgtttcaggctgaagacagagatgatatgctagcttggatcaagacgatccaggagagcagcaacctaaacgaagaggacactggagtcactaacagggatctaattagtcgaagaataaaagaatacaacaatctgatgagcaaagcagaacagttgccaaaaacacctcgccagagtctcagcatcaggcaaactttgcttggtgctaaatcagagccaaagactcaaagcccacactctccgaaggaagagtcggaaaggaaacttctcagtaaagatgataccagtcccccaaaagacaaaggcacatggagaaaaggcattccaagtatcatgagaaagacatttgagaaaaagccaactgctacaggaactttcggcgtccgactagatgactgcccaccagctcatactaatcggtatattccattaatagttgacatatgttgcaaattagttgaagaaagaggtcttgaatatacaggtatttatagagttcctggaaataatgcagccatctcaagtatgcaagaagaactcaacaagggaatggctgatattgatatacaagatgataaatggcgagatttgaatgtgataagcagtttactaaaatccttcttcagaaaactccctgagcctctcttcacaaatgataaatatgctgattttattgaagccaatcgtaaagaagatcctctagatcgtctgaaaacattaaaaagactaattcacgatttgcctgaacatcattatgaaacacttaagttcctttcagctcatctgaagacagtggcagaaaattcagaaaaaaataagatggaaccaagaaacctagcaatagtgtttggtcccacccttgttcgaacatcagaagacaacatgacccacatggtcacccacatgcctgaccagtacaagattgtagaaacgctcatccagcaccatgactggtttttcacagaagaaggtgctgaagagcctcttacaacagtgcaggaggaaagcacagtagactcccagccagtgccaaacatagatcatttactcaccaacattggaaggacaggagtctccccaggagatgtatcagattcagctactagtgactcaacaaaatctaagggttcttggggatctggaaaggatcagtatagcagggaactgcttgtgtcctccatctttgcagctgctagtcgcaagaggaagaagccgaaagaaaaagcacagcctagcagctcagaagatgaactggacaatgtattttttaagaaagaaaatgtggaacagtgtcacaatgatactaaagaggagtccaaaaaagaaagtgagacactgggcagaaaacagaagatcatcattgccaaagaaaacagcactaggaaagaccccagcacgacaaaagatgaaaagatatcactaggaaaagagagcacgccttctgaagaaccctcaccaccacacaactcaaaacacaacaagtcaccaactctcagctgtcgctttgccatcctgaaagagagccccaggtcacttctggcacagaagtcctcccaccttgaagagacaggctctgactctggcactttgctcagcacgtcttcccaggcctccctggcaaggttttccatgaagaaatcaaccagtccagaaacgaaacatagcgagtttttggccaacgtcagcaccatcacctcagattattccaccacatcgtctgctacatacttgactagcctggactccagtcgactgagccctgaggtgcaatccgtggcagagagcaagggggacgaggcagatgacgagagaagcgaactcatcagtgaagggcggcctgtggaaaccgacagcgagagcgagtttcccgtgttccccacagccttgacttcagagaggcttttccgaggaaaactgcaagaagtgactaagagcagccggagaaattctgaaggaagtgaattaagttgcaccgagggaagtttaacatcaagtttagatagccggagacagctcttcagttcccataaactcatcgaatgtgatactctttccaggaaaaaatcagctagattcaagtcagatagtggaagtctaggagatgccaagaatgagaaagaagcaccttcgttaactaaagtgtttgatgttatgaaaaaaggaaagtcaactgggagtttactgacacccaccagaggcgaatccgaaaaacaggaacccacatggaaaacgaaaatagcagatcggttaaaactgagacccagagcccctgcggatgacatgtttggagtagggaatcacaaagtgaatgccgagactgctaaaaggaaaagcatccggcgcagacatacactaggagggcacagagatgctaccgaaatcagcgttttgaatttttggaaagtgcatgagcagagcggggagagagaatctgaactttcagctgtaaaccggttaaaaccaaaatgctcagcccaggacctttccatctcagactggctggccagggaacgcctacgcaccagtacctctgaccttagcagaggagaaatcggagatccccagacagagaacccaagcacacgagaaatagccacgaccgacacacctttgtctcttcattgcaacacaggcagttcttccagcaccttggcttcaacaaacaggccccttctttccataccaccacagtcacctgaccaaataaacggagaaagcttccagaacgtgagcaaaaatgctagttctgcagcgaatgcccaacctcataaactgtctgaaaccccaggcactaaagcagagtttcatccctgtctttaaactgggggtatgtccactctagcaagtaaaaaaactactgttacacgttccagtaactctgtcaatattttcttgtatcagaattgttattatgcagccttcatttgggctggtttcatcattttgcactgtgaaatagctttacagtgcattactacagccagaagaacatatatatatatatatatttaaaaatatatcggatagttgtatacaaatgagcaaggtatttgttgcaacttactacatagcatatacccaaaatcactgaagaaaatcgctggcatcagtgtgcagcaaatttgttcttttggtttcatcactaacaaaagtgcctcatcataaaaatacagttggtttttagggtgccatattgttaaaattagataacttacttacattgaataaacgaatgcgttttattggtaacagatatcattacatttaccagttttaacacaggtggatacagaacttccattctttagtcattccaggtggatctgagttttatattcaaacttttaatacagtttttgagttttgtgtgacttgaatttttaatctttctgtaaaatacgtaacttaaatgaacatattaaatgtgtatcttttcttcagataccagatttgatataatgttgtaacataggtgtgtagatagtggatcctggatggaactggcttctttatcgagaagaatataattctgcatgaggacttaatgaatccaaacctgtgtcatgcctgtgtgcatacccaattaaacactggaaataaaaattgttttggtg

SEQ ID NO: 212 - protein, 1286 aa, Homo sapiens
PDQQVETGKSPSLSGASAKPAPQSSENAGTSDLELPVSQRSQDLSLQEAETEQSDTLDNKEAVILREKPPSGRQTPQPLRHQSYILAVNDQETGSDTTCWLPNDARREVHIKRMEERKASSTSPPGDSLASIPFIDEPTSPSIDHDIAHIPASAVISASTSQVPSIATVPPCLTTSAPLIRRQLSHDHESVGPPSLDAQPNSKTERSKSYDEGLDDYREDAKLSFKHVSSLKGIKIADSQKSSEDSGSRKDSSSEVFSDAAKEGWLHFRPLVTDKGKRVGGSIRPWKQMYVVLRGHSLYLYKDKREQTTPSEEEQPISVNACLIDISYSETKRKNVFRLTTSDCECLFQAEDRDDMLAWIKTIQESSNLNEEDTGVTNRDLISRRIKEYNNLMSKAEQLPKTPRQSLSIRQTLLGAKSEPKTQSPHSPKEESERKLLSKDDTSPPKDKGTWRKGIPSIMRKTFEKKPTATGTFGVRLDDCPPAHTNRYIPLIVDICCKLVEERGLEYTGIYRVPGNNAAISSMQEELNKGMADIDIQDDKWRDLNVISSLLKSFFRKLPEPLFTNDKYADFIEANRKEDPLDRLKTLKRLIHDLPEHHYETLKFLSAHLKTVAENSEKNKMEPRNLAIVFGPTLVRTSEDNMTHMVTHMPDQYKIVETLIQHHDWFFTEEGAEEPLTTVQEESTVDSQPVPNIDHLLTNIGRTGVSPGDVSDSATSDSTKSKGSWGSGKDQYSRELLVSSIFAAASRKRKKPKEKAQPSSSEDELDNVFFKKENVEQCHNDTKEESKKESETLGRKQKIIIAKENSTRKDPSTTKDEKISLGKESTPSEEPSPPHNSKHNKSPTLSCRFAILKESPRSLLAQKSSHLEETGSDSGTLLSTSSQASLARFSMKKSTSPETKHSEFLANVSTITSDYSTTSSATYLTSLDSSRLSPEVQSVAESKGDEADDERSELISEGRPVETDSESEFPVFPTALTSERLFRGKLQEVTKSSRRNSEGSELSCTEGSLTSSLDSRRQLFSSHKLIECDTLSRKKSARFKSDSGSLGDAKNEKEAPSLTKVFDVMKKGKSTGSLLTPTRGESEKQEPTWKTKIADRLKLRPRAPADDMFGVGNHKVNAETAKRKSIRRRHTLGGHRDATEISVLNFWKVHEQSGERESELSAVNRLKPKCSAQDLSISDWLARERLRTSTSDLSRGEIGDPQTENPSTREIATTDTPLSLHCNTGSSSSTLASTNRPLLSIPPQSPDQINGESFQNVSKNASSAANAQPHKLSETPGTKAEFHPCL

SEQ ID NO: 213 - DNA, 2509 bp, Homo sapiens
  CDS (18)..(635)
gaaaactgagacacaaaatggctgcaaataagcccaagggtcagaattctttggctttacacaaagtcatcatggtgggcagtggtggcgtgggcaagtcagctctgactctacagttcatgtacgatgagtttgtggaggactatgagcctaccaaagcagacagctatcggaagaaggtagtgctagatggggaggaagtccagatcgatatcttagatacagctgggcaggaggactacgctgcaattagagacaactacttccgaagtggggaggggttcctctgtgttttctctattacagaaatggaatcctttgcagctacagctgacttcagggagcagattttaagagtaaaagaagatgagaatgttccatttctactggttggtaacaaatcagatttagaagataaaagacaggtttctgtagaagaggcaaaaaacagagctgagcagtggaatgttaactacgtggaaacatctgctaaaacacgagctaatgttgacaaggtattttttgatttaatgagagaaattcgagcgagaaagatggaagacagcaaagaaaagaatggaaaaaagaagaggaaaagtttagccaagagaatcagagaaagatgctgcattttataatcaaagcccaaactcctttcttatcttgaccatactaataaatataatttataagcattgccattgaaggcttaattgactgaaattactttaacattttggaaattgttgtatatcactaaaagcatgaattggaactgcaatgaaagtcaaatttactttaaaaagaaattaatatggcttcaccaagaagcaaagttcaacttatttcataattgcctacatttatcatggtcctgaatgtagcgtgtaagcttgtgtttcttgggcagtctttcttgaaattgaagaggtgaaatgggggtggggagtgggaggaaaggtgacttcctctggtgtttattataaagcttaaattttatatcattttaaaatgtcttggtcttctactgccttgaaaaatgacaattgtgaacatgatagttaaactaccactttttttaaccattattatgcaaaatttagaagaaaagttattggcatggttgttgcatatagttaaactgagagtaattcatctgtgaatctgctttaattacctggtgagtaacttagaaaagtggtgtaaacttgtacatggaattttttgaatatgccttaatttagaaactgaaaaatatctggttatatcattctgggtgtgttcttactgacaccaggggtccgctgccccatgtgtcctggtgagaaaatatatgcctggcacagcttttgtatagaaaattcttgagaagtaactgtccgctagaagtctgtccaaatttaaaatgtgtgccatattctggttcttgaaaataagattccagagctctttgatcgcttttaataaactgcaagttcattttaaatgaagggccagcatatatacttgcaagataattttcagctgcaaggattcagcaccagttatgtttgaatgaaccctccttttctctgagattctggtccctggaaatccctttctgctagtggtgagcatgtaagtgttaagtttttaatctgggagcagggcataggaagaaaatgtcagtagtgctaatgcattttgcactagaacgcttcgggaaaatattcatgcttgccatctgttcatttctaaatttatattcataaagttacagtttgatacaggaattattaggagtaattcttttctgtttctgtttataatgaagaacactgtagctacattttcagaagttaacatcaagccatcaaacctgggtatagtgcagaaaacgtggcacacactgaccacacattaggctgtgtcaccattgtgtggtgtacctgctggaagaattctagcatgctacttggggacataatttcagtgggaaatatgccactgaccgattttttttttttcctctttgcagtggggctaggacagttgattcaacaaagtatttttttcttttttctcagtcctaatttgaacaggtcaaagatgtgttcaggcattccaggtaacaggtgtgtatgtaaagttaaaaataggctttttaggaactcactctttagatatttacatccagcttctcatgttaaatatttgtccttaaagggtttgagatgtacatctttcatttcgtatttctcataggctatgccatgtgcggaattcaagttaccaatgtaacactggccagcgggcccagcaatctccatgtgtacttattacagtcttatttaaccaggggtcctaaccactaacattgtgactttgctttgagacctttcctctcctgggtactgaggtgctatgaagccaactgacaaagatgcatcacgtgtcttaggctgatgccactacccgatttgtttatttgcaatttgagccatttaaagaccaataaacttcctttttt

SEQ ID NO: 214 - protein, 206 aa, Homo sapiens
MAANKPKGQNSLALHKVIMVGSGGVGKSALTLQFMYDEFVEDYEPTKADSYRKKVVLDGEEVQIDILDTAGQEDYAAIRDNYFRSGEGFLCVFSITEMESFAATADFREQILRVKEDENVPFLLVGNKSDLEDKRQVSVEEAKNRAEQWNVNYVETSAKTRANVDKVFFDLMREIRARKMEDSKEKNGKKKRKSLAKRIRERCCIL

SEQ ID NO: 215 - DNA, 1597 bp, Homo sapiens
  CDS (123)..(1595)
aaaaaaatatatttccctcctgctccttctgcgttcacaagctaagttgtttatctcggctgcggcgggaactgcggacggtggcgggcgagcggctcctctgccagagttgatattcactgatggactccaaagaatcattaactcctggtagagaagaaaaccccagcagtgtgcttgctcaggagaggggagatgtgatggacttctataaaaccctaagaggaggagctactgtgaaggtttctgcgtcttcaccctcactggctgtcgcttctcaatcagactccaagcagcgaagacttttggttgattttccaaaaggctcagtaagcaatgcgcagcagccagatctgtccaaagcagtttcactctcaatgggactgtatatgggagagacagaaacaaaagtgatgggaaatgacctgggattcccacagcagggccaaatcagcctttcctcgggggaaacagacttaaagcttttggaagaaagcattgcaaacctcaataggtcgaccagtgttccagagaaccccaagagttcagcatccactgctgtgtctgctgcccccacagagaaggagtttccaaaaactcactctgatgtatcttcagaacagcaacatttgaagggccagactggcaccaacggtggcaatgtgaaattgtataccacagaccaaagcacctttgacattttgcaggatttggagttttcttctgggtccccaggtaaagagacgaatgagagtccttggagatcagacctgttgatagatgaaaactgtttgctttctcctctggcgggagaagacgattcattccttttggaaggaaactcgaatgaggactgcaagcctctcattttaccggacactaaacccaaaattaaggataatggagatctggttttgtcaagccccagtaatgtaacactgccccaagtgaaaacagaaaaagaagatttcatcgaactctgcacccctggggtaattaagcaagagaaactgggcacagtttactgtcaggcaagctttcctggagcaaatataattggtaataaaatgtctgccatttctgttcatggtgtgagtacctctggaggacagatgtaccactatgacatgaatacagcatccctttctcaacagcaggatcagaagcctatttttaatgtcattccaccaattcccgttggttccgaaaattggaataggtgccaaggatctggagatgacaacttgacttctctggggactctgaacttccctggtcgaacagttttttctaatggctattcaagccccagcatgagaccagatgtaagctctcctccatccagctcctcaacagcaacaacaggaccacctcccaaactctgcctggtgtgctctgatgaagcttcaggatgtcattatggagtcttaacttgtggaagctgtaaagttttcttcaaaagagcagtggaaggtagacagcacaattacctatgtgctggaaggaatgattgcatcatcgataaaattcgaagaaaaaactgcccagcatgccgctatcgaaaatgtcttcaggctggaatgaacctggaagctcg

SEQ ID NO: 216 - protein, 491 aa, Homo sapiens
MDSKESLTPGREENPSSVLAQERGDVMDFYKTLRGGATVKVSASSPSLAVASQSDSKQRRLLVDFPKGSVSNAQQPDLSKAVSLSMGLYMGETETKVMGNDLGFPQQGQISLSSGETDLKLLEESIANLNRSTSVPENPKSSASTAVSAAPTEKEFPKTHSDVSSEQQHLKGQTGTNGGNVKLYTTDQSTFDILQDLEFSSGSPGKETNESPWRSDLLIDENCLLSPLAGEDDSFLLEGNSNEDCKPLILPDTKPKIKDNGDLVLSSPSNVTLPQVKTEKEDFIELCTPGVIKQEKLGTVYCQASFPGANIIGNKMSAISVHGVSTSGGQMYHYDMNTASLSQQQDQKPIFNVIPPIPVGSENWNRCQGSGDDNLTSLGTLNFPGRTVFSNGYSSPSMRPDVSSPPSSSSTATTGPPPKLCLVCSDEASGCHYGVLTCGSCKVFFKRAVEGRQHNYLCAGRNDCIIDKIRRKNCPACRYRKCLQAGMNLEA

SEQ ID NO: 217 - DNA, 1263 bp, Homo sapiens
  CDS (47)..(1261)
aagcaatgcgcagcagccagatctgtccaaagcagtttcactctcaatgggactgtatatgggagagacagaaacaaaagtgatgggaaatgacctgggattcccacagcagggccaaatcagcctttcctcgggggaaacagacttaaagcttttggaagaaagcattgcaaacctcaataggtcgaccagtgttccagagaaccccaagagttcagcatccactgctgtgtctgctgcccccacagagaaggagtttccaaaaactcactctgatgtatcttcagaacagcaacatttgaagggccagactggcaccaacggtggcaatgtgaaattgtataccacagaccaaagcacctttgacattttgcaggatttggagttttcttctgggtccccaggtaaagagacgaatgagagtccttggagatcagacctgttgatagatgaaaactgtttgctttctcctctggcgggagaagacgattcattccttttggaaggaaactcgaatgaggactgcaagcctctcattttaccggacactaaacccaaaattaaggataatggagatctggttttgtcaagccccagtaatgtaacactgccccaagtgaaaacagaaaaagaagatttcatcgaactctgcacccctggggtaattaagcaagagaaactgggcacagtttactgtcaggcaagctttcctggagcaaatataattggtaataaaatgtctgccatttctgttcatggtgtgagtacctctggaggacagatgtaccactatgacatgaatacagcatccctttctcaacagcaggatcagaagcctatttttaatgtcattccaccaattcccgttggttccgaaaattggaataggtgccaaggatctggagatgacaacttgacttctctggggactctgaacttccctggtcgaacagttttttctaatggctattcaagccccagcatgagaccagatgtaagccctcctccatccagctcctcaacagcaacaacaggaccacctcccaaactctgcctggtgtgctctgatgaagcttcaggatgttattatggagtcttaacttgtggaagctgtaaagttttcttcaaaagagcagtggaaggacagcacaattacctatgtgctggaaggaatgattgcatcatcgataaaattcgaagaaaaaactgcccagcatgccgctatcgaaaatgtcttcaggctggaatgaacctggaagctcg

SEQ ID NO: 218 - protein, 405 aa, Homo sapiens
MGLYMGETETKVMGNDLGFPQQGQISLSSGETDLKLLEESIANLNRSTSVPENPKSSASTAVSAAPTEKEFPKTHSDVSSEQQHLKGQTGTNGGNVKLYTTDQSTFDILQDLEFSSGSPGKETNESPWRSDLLIDENCLLSPLAGEDDSFLLEGNSNEDCKPLILPDTKPKIKDNGDLVLSSPSNVTLPQVKTEKEDFIELCTPGVIKQEKLGTVYCQASFPGANIIGNKMSAISVHGVSTSGGQMYHYDMNTASLSQQQDQKPIFNVIPPIPVGSENWNRCQGSGDDNLTSLGTLNFPGRTVFSNGYSSPSMRPDVSPPPSSSSTATTGPPPKLCLVCSDEASGCYYGVLTCGSCKVFFKRAVEGQHNYLCAGRNDCIIDKIRRKNCPACRYRKCLQAGMNLEA

SEQ ID NO: 219 - DNA, 930 bp, Homo sapiens
  CDS (398)..(928)
gtataccacagaccaaagcacctttgacattttgcaggatttggagttttcttctgggtccccaggtaaagagacgaatgagagtccttggagatcagacctgttgatagatgaaaactgtttgctttctcctctggcgggagaagacgattcattccttttggaaggaaactcgaatgaggactgcaagcctctcattttaccggacactaaacccaaaattaaggataatggagatctggttttgtcaagccccagtaatgtaacactgccccaagtgaaaacagaaaaagaagatttcatcgaactctgcacccctggggtaattaagcaagagaaactgggcacagtttactgtcaggcaagctttcctggagcaaatataattggtaataaaatgtctgccatttctgttcatggtgtgagtacctctggaggacagatgtaccactatgacatgaatacagcatccctttctcaacagcaggatcagaagcctatttttaatgtcattccaccaattcccgttggttccgaaaattggaataggtgccaaggatctggagatgacaacttgacttctctggggactctgaacttccctggtcgaacagttttttctaatggctattcaagccccagcatgagaccagatgtaagctctcctccatccagctcctcaacagcaacaacaggaccacctcccaaactctgcctggtgtgctctgatgaagcttcaggatgtcattatggagtcttaacttgtggaagctgtaaagttttcttcaaaagagcagtggaaggacagcacaattacctatgtgctggaaggaatgattgcatcatcgataaaattcgaagaaaaaactgcccagcatgccgctatcgaaaatgtcttcaggctggaatgaacctggaagctcgaaaaac

SEQ ID NO: 220 - protein, 177 aa, Homo sapiens
MSAISVHGVSTSGGQMYHYDMNTASLSQQQDQKPIFNVIPPIPVGSENWNRCQGSGDDNLTSLGTLNFPGRTVFSNGYSSPSMRPDVSSPPSSSSTATTGPPPKLCLVCSDEASGCHYGVLTCGSCKVFFKRAVEGQHNYLCAGRNDCIIDKIRRKNCPACRYRKCLQAGMNLEARK

SEQ ID NO: 221 - DNA, 930 bp, Homo sapiens; identical to SEQ ID NO: 219
  CDS (2)..(928)

SEQ ID NO: 222 - protein, 309 aa, Homo sapiens
YTTDQSTFDILQDLEFSSGSPGKETNESPWRSDLLIDENCLLSPLAGEDDSFLLEGNSNEDCKPLILPDTKPKIKDNGDLVLSSPSNVTLPQVKTEKEDFIELCTPGVIKQEKLGTVYCQASFPGANIIGNKMSAISVHGVSTSGGQMYHYDMNTASLSQQQDQKPIFNVIPPIPVGSENWNRCQGSGDDNLTSLGTLNFPGRTVFSNGYSSPSMRPDVSSPPSSSSTATTGPPPKLCLVCSDEASGCHYGVLTCGSCKVFFKRAVEGQHNYLCAGRNDCIIDKIRRKNCPACRYRKCLQAGMNLEARK

SEQ ID NO: 223 - DNA, 1681 bp, Homo sapiens
  CDS (210)..(1679)
agctgggcaatgggagactttcttaaataggggctctccccccacccatggagaaaggggcggctgtttacttcctttttttagaaaaaaaaaatatatttccctcctgctccttctgcgttcacaagctaagttgtttatctcggctgcggcgggaactgcggacggtggcgggcgagcggctcctctgccagagttgatattcactgatggactccaaagaatcattaactcctggtagagaagaaaaccccagcagtgtgcttgctcaggagaggggagatgtgatggacttctataaaaccctaagaggaggagctactgtgaaggtttctgcgtcttcaccctcactggctgtcgcttctcaatcagactccaagcagcgaagacttttggttgattttccaaaaggctcagtaagcaatgcgcagcagccagatctgtccaaagcagtttcactctcaatgggactgtatatgggagagacagaaacaaaagtgatgggaaatgacctgggattcccacagcagggccaaatcagcctttcctcgggggaaacagacttaaagcttttggaagaaagcattgcaaacctcaataggtcgaccagtgttccagagaaccccaagagttcagcatccactgctgtgtctgctgcccccacagagaaggagtttccaaaaactcactctgatgtatcttcagaacagcaacatttgaagggccagactggcaccaacggtggcaatgtgaaattgtataccacagaccaaagcacctttgacattttgcaggatttggagttttcttctgggtccccaggtaaagagacgaatgagagtccttggagatcagacctgttgatagatgaaaactgtttgctttctcctctggcgggagaagacgattcattccttttggaaggaaactcgaatgaggactgcaagcctctcattttaccggacactaaacccaaaattaaggataatggagatctggttttgtcaagccccagtaatgtaacactgccccaagtgaaaacagaaaaagaagatttcatcgaactctgcacccctggggtaattaagcaagagaaactgggcacagtttactgtcaggcaagctttcctggagcaaatataattggtaataaaatgtctgccatttctgttcatggtgtgagtacctctggaggacagatgtaccactatgacatgaatacagcatccctttctcaacagcaggatcagaagcctatttttaatgtcattccaccaattcccgttggttccgaaaattggaataggtgccaaggatctggagatgacaacttgacttctctggggactctgaacttccctggtcgaacagttttttctaatggctattcaagccccagcatgagaccagatgtaagctctcctccatccagctcctcaacagcaacaacaggaccacctcccaaactctgcctggtgtgctctgatgaagcttcaggatgtcattatggagtcttaacttgtggaagctgtaaagttttcttcaaaagagcagtggaaggacagcacaattacctatgtgctggaaggaatgattgcatcatcgataaaattcgaagaaaaaactgcccagcatgccgctatcgaaaatgtcttcaggctggaatgaacctggaagctcg

SEQ ID NO: 224 - protein, 490 aa, Homo sapiens
MDSKESLTPGREENPSSVLAQERGDVMDFYKTLRGGATVKVSASSPSLAVASQSDSKQRRLLVDFPKGSVSNAQQPDLSKAVSLSMGLYMGETETKVMGNDLGFPQQGQISLSSGETDLKLLEESIANLNRSTSVPENPKSSASTAVSAAPTEKEFPKTHSDVSSEQQHLKGQTGTNGGNVKLYTTDQSTFDILQDLEFSSGSPGKETNESPWRSDLLIDENCLLSPLAGEDDSFLLEGNSNEDCKPLILPDTKPKIKDNGDLVLSSPSNVTLPQVKTEKEDFIELCTPGVIKQEKLGTVYCQASFPGANIIGNKMSAISVHGVSTSGGQMYHYDMNTASLSQQQDQKPIFNVIPPIPVGSENWNRCQGSGDDNLTSLGTLNFPGRTVFSNGYSSPSMRPDVSSPPSSSSTATTGPPPKLCLVCSDEASGCHYGVLTCGSCKVFFKRAVEGQHNYLCAGRNDCIIDKIRRKNCPACRYRKCLQAGMNLEA

SEQ ID NO: 225 - DNA, 4788 bp, Homo sapiens
  CDS (133)..(2463)
tttttagaaaaaaaaaatatatttccctcctgctccttctgcgttcacaagctaagttgtttatctcggctgcggcgggaactgcggacggtggcgggcgagcggctcctctgccagagttgatattcactgatggactccaaagaatcattaactcctggtagagaagaaaaccccagcagtgtgcttgctcaggagaggggagatgtgatggacttctataaaaccctaagaggaggagctactgtgaaggtttctgcgtcttcaccctcactggctgtcgcttctcaatcagactccaagcagcgaagacttttggttgattttccaaaaggctcagtaagcaatgcgcagcagccagatctgtccaaagcagtttcactctcaatgggactgtatatgggagagacagaaacaaaagtgatgggaaatgacctgggattcccacagcagggccaaatcagcctttcctcgggggaaacagacttaaagcttttggaagaaagcattgcaaacctcaataggtcgaccagtgttccagagaaccccaagagttcagcatccactgctgtgtctgctgcccccacagagaaggagtttccaaaaactcactctgatgtatcttcagaacagcaacatttgaagggccagactggcaccaacggtggcaatgtgaaattgtataccacagaccaaagcacctttgacattttgcaggatttggagttttcttctgggtccccaggtaaagagacgaatgagagtccttggagatcagacctgttgatagatgaaaactgtttgctttctcctctggcgggagaagacgattcattccttttggaaggaaactcgaatgaggactgcaagcctctcattttaccggacactaaacccaaaattaaggataatggagatctggttttgtcaagccccagtaatgtaacactgccccaagtgaaaacagaaaaagaagatttcatcgaactctgcacccctggggtaattaagcaagagaaactgggcacagtttactgtcaggcaagctttcctggagcaaatataattggtaataaaatgtctgccatttctgttcatggtgtgagtacctctggaggacagatgtaccactatgacatgaatacagcatccctttctcaacagcaggatcagaagcctatttttaatgtcattccaccaattcccgttggttccgaaaattggaataggtgccaaggatctggagatgacaacttgacttctctggggactctgaacttccctggtcgaacagttttttctaatggctattcaagccccagcatgagaccagatgtaagctctcctccatccagctcctcaacagcaacaacaggaccacctcccaaactctgcctggtgtgctctgatgaagcttcaggatgtcattatggagtcttaacttgtggaagctgtaaagttttcttcaaaagagcagtggaaggacagcacaattacctatgtgctggaaggaatgattgcatcatcgataaaattcgaagaaaaaactgcccagcatgccgctatcgaaaatgtcttcaggctggaatgaacctggaagctcgaaaaacaaagaaaaaaataaaaggaattcagcaggccactacaggagtctcacaagaaacctctgaaaatcctggtaacaaaacaatagttcctgcaacgttaccacaactcacccctaccctggtgtcactgttggaggttattgaacctgaagtgttatatgcaggatatgatagctctgttccagactcaacttggaggatcatgactacgctcaacatgttaggagggcggcaagtgattgcagcagtgaaatgggcaaaggcaataccaggtttcaggaacttacacctggatgaccaaatgaccctactgcagtactcctggatgtttcttatggcatttgctctggggtggagatcatatagacaatcaagtgcaaacctgctgtgttttgctcctgatctgattattaatgagcagagaatgactctaccctgcatgtacgaccaatgtaaacacatgctgtatgtttcctctgagttacacaggcttcaggtatcttatgaagagtatctctgtatgaaaaccttactgcttctctcttcagttcctaaggacggtctgaagagccaagagctatttgatgaaattagaatgacctacatcaaagagctaggaaaagccattgtcaagagggaaggaaactccagccagaactggcagcggttttatcaactgacaaaactcttggattctatgcatgaagtggttgaaaatctccttaactattgcttccaaacatttttggataagaccatgagtattgaattccccgagatgttagctgaaatcatcaccaatcagataccaaaatattcaaatggaaatatcaaaaaacttctgtttcatcaaaagtgactgccttaataagaatggttgccttaaagaaagtcgaattaatagcttttattgtataaactatcagtttgtcctgtagaggttttgttgttttattttttattgttttcatctgttgttttgttttaaatacgcactacatgtggtttatagagggccaagacttggcaacagaagcagttgagtcgtcatcacttttcagtgatgggagagtagatggtgaaatttattagttaatatatcccagaaattagaaaccttaatatgtggacgtaatctccacagtcaaagaaggatggcacctaaaccaccagtgcccaaagtctgtgtgatgaactttctcttcatactttttttcacagttggctggatgaaattttctagactttctgttggtgtatcccccccctgtatagttaggatagcatttttgatttatgcatggaaacctgaaaaaaagtttacaagtgtatatcagaaaagggaagttgtgccttttatagctattactgtctggttttaacaatttcctttatatttagtgaactacgcttgctcattttttcttacataattttttattcaagttattgtacagctgtttaagatgggcagctagttcgtagctttcccaaataaactctaaacattaatcaatcatctgtgtgaaaatgggttggtgcttctaacctgatggcacttagctatcagaagaccacaaaaattgactcaaatctccagtattcttgtcaaaaaaaaaaaaaaaaaagctcatattttgtatatatctgcttcagtggagaattatataggttgtgcaaattaacagtcctaactggtatagagcacctagtccagtgacctgctgggtaaactgtggatgatggttgcaaaagactaatttaaaaaataactaccaagaggccctgtctgtacctaacgccctatttttgcaatggctatatggcaagaaagctggtaaactatttgtctttcaggaccttttgaagtagtttgtataacttcttaaaagttgtgattccagataaccagctgtaacacagctgagagacttttaatcagacaaagtaattcctctcactaaactttacccaaaaactaaatctctaatatggcaaaaatggctagacacccattttcacattcccatctgtcaccaattggttaatctttcctgatggtacaggaaagctcagctactgatttttgtgatttagaactgtatgtcagacatccatgtttgtaaaactacacatccctaatgtgtgccatagagtttaacacaagtcctgtgaatttcttcactgttgaaaattattttaaacaaaatagaagctgtagtagccctttctgtgtgcaccttaccaactttctgtaaactcaaaacttaacatatttactaagccacaagaaatttgatttctattcaaggtggccaaattatttgtgtaatagaaaactgaaaatctaatattaaaaatatggaacttctaatatatttttatatttagttatagtttcagatatatatcatattggtattcactaatctgggaagggaagggctactgcagctttacatgcaatttattaaaatgattgtaaaatagcttgtatagtgtaaaataagaatgatttttagatgagattgttttatcatgacatgttatatattttttgtaggggtcaaagaaatgctgatggataacctatatgatttatagtttgtacatgcattcatacaggcagcgatggtctcagaaaccaaacagtttgctctaggggaagagggagatggagactggtcctgtgtgcagtgaaggttgctgaggctctgacccagtgagattacagaggaagttatcctctgcctcccattctgaccacccttctcattccaacagtgagtctgtcagcgcaggtttagtttactcaatctccccttgcactaaagtatgtaaagtatgtaaacaggagacaggaaggtggtgcttacatccttaaaggcaccatctaatagcgggttactttcacatacagccctcccccagcagttgaatgacaacagaagcttcagaagtttggcaatagtttgcatagaggtaccagcaatatgtaaatagtgcagaatctcataggttgccaataatacactaattcctttctatcctacaacaagagtttatttccaaataaaatgaggacatgtttttgttttctttgaatgctttttgaatgttatttgttattttcagtattttggagaaattatttaataaaaaaacaatcatttgctttttg

SEQ ID NO: 226 - protein, 777 aa, Homo sapiens
MDSKESLTPGREENPSSVLAQERGDVMDFYKTLRGGATVKVSASSPSLAVASQSDSKQRRLLVDFPKGSVSNAQQPDLSKAVSLSMGLYMGETETKVMGNDLGFPQQGQISLSSGETDLKLLEESIANLNRSTSVPENPKSSASTAVSAAPTEKEFPKTHSDVSSEQQHLKGQTGTNGGNVKLYTTDQSTFDILQDLEFSSGSPGKETNESPWRSDLLIDENCLLSPLAGEDDSFLLEGNSNEDCKPLILPDTKPKIKDNGDLVLSSPSNVTLPQVKTEKEDFIELCTPGVIKQEKLGTVYCQASFPGANIIGNKMSAISVHGVSTSGGQMYHYDMNTASLSQQQDQKPIFNVIPPIPVGSENWNRCQGSGDDNLTSLGTLNFPGRTVFSNGYSSPSMRPDVSSPPSSSSTATTGPPPKLCLVCSDEASGCHYGVLTCGSCKVFFKRAVEGQHNYLCAGRNDCIIDKIRRKNCPACRYRKCLQAGMNLEARKTKKKIKGIQQATTGVSQETSENPGNKTIVPATLPQLTPTLVSLLEVIEPEVLYAGYDSSVPDSTWRIMTTLNMLGGRQVIAAVKWAKAIPGFRNLHLDDQMTLLQYSWMFLMAFALGWRSYRQSSANLLCFAPDLIINEQRMTLPCMYDQCKHMLYVSSELHRLQVSYEEYLCMKTLLLLSSVPKDGLKSQELFDEIRMTYIKELGKAIVKREGNSSQNWQRFYQLTKLLDSMHEVVENLLNYCFQTFLDKTMSIEFPEMLAEIITNQIPKYSNGNIKKLLFHQK

SEQ ID NO: 227 - DNA, 1598 bp, Homo sapiens
  CDS (56)..(1153)
gaggcaagaattcggcacgagggccctgctggtttctgtgcgggctcttgtcaggatggtgaagctgttcatcggaaacctgccccgggaggctacagagcaggagattcgctcactcttcgagcagtatgggaaggtgctggaatgtgacatcattaagaattacggctttgtgcacatagaagacaagacggcagctgaggatgccatacgcaacctgcaccattacaagcttcatggggtgaacatcaacgtggaagccagcaagaataagagcaaaacctcaacaaagttgcatgtgggcaacatcagtcccacctgcaccaataaggagcttcgagccaagtttgaggagtatggtccggtcatcgaatgtgacatcgtgaaagattatgccttcgtacacatggagcgggcagaggatgcagtggaggccatcaggggccttgataacacagagtttcaaggcaaacgaatgcacgtgcagttgtccaccagccggcttaggactgcgcccgggatgggagaccagagcggctgctatcggtgcgggaaagaggggcactggtccaaagagtgtccgatagatcgttcaggccgcgtggcagacttgaccgagcaatataatgagcaatacggagcagtgcgtacgccttacaccatgagctatggggattcattgtattacaacaacgcgtacggagcgctcgatgcctactacaagcgctgccgtgctgcccggtcctatgaggcagtgcagctgcagctgcctccgtgtataattacgcagagcagaccctgtcccagctgccacaagtccagaatacagccatggccagtcacctcacctccacctctctcgatccctacgatagacacctgttgccgacctcaggagctgctgccacagctgctgctgcagcagcagccgctgctgctgttactgcagcttccacttcatattacgggcgggatcggagccccctgcgtcgcgctacagccccagtccccactgttggagagggctacggttacgggcatgagagtgagttgtcccaagcttcagcagccgcgcggaattctctgtacgacatggcccggtatgagcgggagcagtatgccgatcgggcgcggtactcagccttttaaagcttgaggtgggatgtgtgtgggctgaaattccgagctgcggttgtgcatgagaatacacccttcgtggtaccccatctccgggacgttctcggctctgtgcgttcagtccctcaggaaccgtggaccttaatttaccttgctaagttcagaccttctcttcctttcctttcctttcctctcctgcccattttcctgttcttctgtccttcaatacttctgtagcttcccattcatgttctcttctcccagcaggcctcattgtgtgcagaaactgtggtgggggctgtgctgtctcctccctgcctcctgcctcctgcggctgttggatttgggaatgaccttggtgagagtctcactgctccagggtctctttttggtccaaaggctagacctatagagttggatcactttttttctttccggtgaaataaatggtttttcaactt

SEQ ID NO: 228 - protein, 366 aa, Homo sapiens
MVKLFIGNLPREATEQEIRSLFEQYGKVLECDIIKNYGFVHIEDKTAAEDAIRNLHHYKLHGVNINVEASKNKSKTSTKLHVGNISPTCTNKELRAKFEEYGPVIECDIVKDYAFVHMERAEDAVEAIRGLDNTEFQGKRMHVQLSTSRLRTAPGMGDQSGCYRCGKEGHWSKECPIDRSGRVADLTEQYNEQYGAVRTPYTMSYGDSLYYNNAYGALDAYYKRCRAARSYEAVQLQLPPCIITQSRPCPSCHKSRIQPWPVTSPPPLSIPTIDTCCRPQELLPQLLLQQQPLLLLLQLPLHITGGIGAPCVALQPQSPLLERATVTGMRVSCPKLQQPRGILCTTWPGMSGSSMPIGRGTQPFKA

SEQ ID NO: 229 - DNA, 3369 bp, Homo sapiens
  CDS (1030)..(2538)
taaggtatttataccaattgacgtttaaaacgtctctaacgtgccttaaattgcgtttaaacgatactatgagctaatacactctgacaaacttcttgtcagcacgttcaaactcttcaacataatcaattgccacaacataattatacgtgtcaatcttagcaactgacatattgccgtcaaattcttgcaactctgcaatcaattctgctactgtcatcattctacctccaaatattcaaattttacgcccttgtgagacttcagtcttcccttaagtacgttgacaattgtgcttggcagaatacctcgctccttagcgtaaatggtagcactgtcaaatacttcatacgtaccgtcttcatggattgctttaataggtttttgattagttggctttaattgtttgtttgttttaacaaaattcttctctgcgtaattgttaatctcatctagtctgttgctgtctttaaacgcgttataaatcagagttttaactgattttgtttttgatttaccttttttagacagtgccactactagccaaccagacccactacgacccggctttaaaattcttccgtaacgaacactctttacacgtccatgtgtacttacttgataatatccttcgtagccttcgatatctttccatacttcaatcatttattttctcatttctatttattaactaacttatgttctgctttgttgagtacaacgtgccagttatctaagttcatgttagttttgtatccgtctattggctctaaaaactcccgatactccaacttgcggacaaacgtttcaaacatcaacttcttaactaacacattcaatcgtcgatcgcttttcgacgtttttccaattgtgacgtaaacgtttcctttaattcttacgcatgtttttaattctatatcgacaccgtgtgatactttctttacgtggtcctttatttgatattaaaatatattccgtcgcagtctccacggcgcaggcccacggtagcgcagccgctctgagaacttcatggaggaacacggagtgacccaaaccgaacatatggctaccatagaagcacatgcagtggcccagcaagtgcagcaggtccatgtggctacttacaccgagcatagtatgctgagtgctgatgaagactcgccttcttcgcccgaggacacctcttacgatgactcagatatactcaactccacagcagctgatgaggtgacagctcatctggcagctgcaggtcctgtgggaatggccgctgctgctgctgtggcaacaggaaagaaacggaaacggcctcatgtatttgagtctaatccatctatccggaagaggcaacaaacacgtttgcttcggaaacttcgagccacgttagatgaatatactactcgtgtgggacagcaagctattgtcctctgtatctcaccctccaaacctaaccctgtctttaaagtgtttggtgcagcacctttggagaatgtggtgcgtaagtacaagagcatgatcctggaagacctggagtctgctctggcagaacacgcccctgcgccacaggaggttaactcagaactgccgcctctcaccatcgacggaattccagtctctgtggacaaaatgacccaggcccagcttcgggcatttatcccagagatgctcaagtactctacaggtcggggaaaaccaggctgggggaaagaaagctgcaagcccatctggtggcctgaagatatcccctgggcaaatgtccggagtgatgtccgcacagaagagcaaaagcagagggtttcatggacccaggcactacggaccatagttaaaaactgttataaacagcatgggcgggaagaccttttgtatgcctttgaagatcagcaaacgcaaacacaggccacagccacacatagtatagctcatcttgtaccatcacagactgtagtccagacttttagtaaccctgatggcactgtctcacttatccaggttggtacgggggcaacagtagccacattggctgatgcttcagaattgccaaccacggtcaccgttgcccaagtgaattattctgccgtggctgatggagaggtggaacaaaattgggccacgttacagggaggtgagatgaccatccagacgacgcaagcatcagaggccacccaggcggtggcatcgttggcagaggccgcagtggcagcttctcaggagatgcagcagggagctacagtcactatggcgcttaacagcgaagctgccgcccatgctgtcgccaccctggctgaggccaccttacaaggtgggggacagatcgtcttgtctggggaaaccgcagcagccgtcggagcacttactggagtccaagatgctaatggcctggtccagatccctgtgagcatgtaccagactgtggtgaccagcctcgcccagggcaacggaccagtgcaggtggccatggcccctgtgaccaccaggatatcagacagcgcagtcaccatggacggccaagctgtggaggtggtgacattggaacagtgacatacagccatattatggcatcgttttctagtctacttcaaaattttttacacgtttgcagaggtgcaatcaaatggaattaagtctctcgactttggaaggaaagttttgttaacctttttttttttaaaaggaagaaagccgggattttggaattgcattttttaaagcaccactcttgattttctgggattggtgaagaaactgcattgtcaatttcactgtcccaaaaaagccaaattgtggcaggacttctttctgcggaaatgtgtgtgtatacttatgtgtgtgtatgtgtgagtgtgaatatatgtatatgtgtacatatggacatacacatttacatatatataaagtatatatatacatatatatatatatatgtatgaaacccgcatggaattatctgtatgaaatcaaggtgcgctgtggaaacaataattcacccagtttagtgggtggtagggtacgtggccagacacagtcacccagtttttgttcataccagggtcatgcgttgagctactgacaaactcaggcggaggtgaccatgcccttcaccaaagctgcctcccagtggccacacagaactctccctgctggactcacctgaggaaagaggctccagcatggggtgggtcagagatgtgcttgcaaggtccagggactgcgtggtctgccagctgagatgctcctcgggctggcccaggtgctgaccttgccacaggcagatgaatgtcttgaaagctcccgggcctcagcctcccatctcctctccttcccaggaatccttgatctcatgactattaaaatgttgctctgggtttt

SEQ ID NO: 230 - protein, 503 aa, Homo sapiens
MEEHGVTQTEHMATIEAHAVAQQVQQVHVATYTEHSMLSADEDSPSSPEDTSYDDSDILNSTAADEVTAHLAAAGPVGMAAAAAVATGKKRKRPHVFESNPSIRKRQQTRLLRKLRATLDEYTTRVGQQAIVLCISPSKPNPVFKVFGAAPLENVVRKYKSMILEDLESALAEHAPAPQEVNSELPPLTIDGIPVSVDKMTQAQLRAFIPEMLKYSTGRGKPGWGKESCKPIWWPEDIPWANVRSDVRTEEQKQRVSWTQALRTIVKNCYKQHGREDLLYAFEDQQTQTQATATHSIAHLVPSQTVVQTFSNPDGTVSLIQVGTGATVATLADASELPTTVTVAQVNYSAVADGEVEQNWATLQGGEMTIQTTQASEATQAVASLAEAAVAASQEMQQGATVTMALNSEAAAHAVATLAEATLQGGGQIVLSGETAAAVGALTGVQDANGLVQIPVSMYQTVVTSLAQGNGPVQVAMAPVTTRISDSAVTMDGQAVEVVTLEQ

SEQ ID NO: 231 - DNA, 2558 bp, Homo sapiens
  CDS (58)..(2295)
gaattccgggcgacgcgcgggaacaacgcgagtcggcgcgcgggacgaagaataatcatgggccagactgggaagaaatctgagaagggaccagtttgttggcggaagcgtgtaaaatcagagtacatgcgactgagacagctcaagaggttcagacgagctgatgaagtaaagagtatgtttagttccaatcgtcagaaaattttggaaagaacggaaatcttaaaccaagaatggaaacagcgaaggatacagcctgtgcacatcctgacttctgtgagctcattgcgcgggactagggagtgttcggtgaccagtgacttggattttccaacacaagtcatcccattaaagactctgaatgcagttgcttcagtacccataatgtattcttggtctcccctacagcagaattttatggtggaagatgaaactgttttacataacattccttatatgggagatgaagttttagatcaggatggtactttcattgaagaactaataaaaaattatgatgggaaagtacacggggatagagaatgtgggtttataaatgatgaaatttttgtggagttggtgaatgcccttggtcaatataatgatgatgacgatgatgatgatggagacgatcctgaagaaagagaagaaaagcagaaagatctggaggatcaccgagatgataaagaaagccgcccacctcggaaatttccttctgataaaattttggaggccatttcctcaatgtttccagataagggcacagcagaagaactaaaggaaaaatataaagaactcaccgaacagcagctcccaggcgcacttcctcctgaatgtacccccaacatagatggaccaaatgctaaatctgttcagagagagcaaagcttacactcctttcatacgcttttctgtaggcgatgttttaaatatgactgcttcctacatccttttcatgcaacacccaacacttataagcggaagaacacagaaacagctctagacaacaaaccttgtggaccacagtgttaccagcatttggagggagcaaaggagtttgctgctgctctcaccgctgagcggataaagaccccaccaaaacgtccaggaggccgcagaagaggacggcttcccaataacagtagcaggcccagcacccccaccattaatgtgctggaatcaaaggatacagacagtgatagggaagcagggactgaaacggggggagagaacaatgataaagaagaagaagagaagaaagatgaaacttcgagctcctctgaagcaaattctcggtgtcaaacaccaataaagatgaagccaaatattgaacctcctgagaatgtggagtggagtggtgctgaagcctcaatgtttagagtcctcattggcacttactatgacaatttctgtgccattgctaggttaattgggaccaaaacatgtagacaggtgtatgagtttagagtcaaagaatctagcatcatagctccagctcccgctgaggatgtggatactcctccaaggaaaaagaagaggaaacaccggttgtgggctgcacactgcagaaagatacagctgaaaaaggacggctcctctaaccatgtttacaactatcaaccctgtgatcatccacggcagccttgtgacagttcgtgcccttgtgtgatagcacaaaatttttgtgaaaagttttgtcaatgtagttcagagtgtcaaaaccgctttccgggatgccgctgcaaagcacagtgcaacaccaagcagtgcccgtgctacctggctgtccgagagtgtgaccctgacctctgtcttacttgtggagccgctgaccattgggacagtaaaaatgtgtcctgcaagaactgcagtattcagcggggctccaaaaagcatctattgctggcaccatctgacgtggcaggctgggggatttttatcaaagatcctgtgcagaaaaatgaattcatctcagaatactgtggagagattatttctcaagatgaagctgacagaagagggaaagtgtatgataaatacatgtgcagctttctgttcaacttgaacaatgattttgtggtggatgcaacccgcaagggtaacaaaattcgttttgcaaatcattcggtaaatccaaactgctatgcaaaagttatgatggttaacggtgatcacaggataggtatttttgccaagagagccatccagactggcgaagagctgtttgttgattacagatacagccaggctgatgccctgaagtatgtcggcatcgaaagagaaatggaaatcccttgacatctgctacctcctccccctcctctgaaacagctgccttagcttcaggaacctcgagtactgtgggcaatttagaaaaagaacatgcagtttgaaattctgaatttgcaaagtactgtaagaataatttatagtaatgagtttaaaaatcaactttttattgccttctcaccagctgcaaagtgttttgtaccagtgaatttttgcaataatgcagtatggtacatttttcaactttgaataaagaatacttgaacttg

SEQ ID NO: 232 - protein, 746 aa, Homo sapiens
MGQTGKKSEKGPVCWRKRVKSEYMRLRQLKRFRRADEVKSMFSSNRQKILERTEILNQEWKQRRIQPVHILTSVSSLRGTRECSVTSDLDFPTQVIPLKTLNAVASVPIMYSWSPLQQNFMVEDETVLHNIPYMGDEVLDQDGTFIEELIKNYDGKVHGDRECGFINDEIFVELVNALGQYNDDDDDDDGDDPEEREEKQKDLEDHRDDKESRPPRKFPSDKILEAISSMFPDKGTAEELKEKYKELTEQQLPGALPPECTPNIDGPNAKSVQREQSLHSFHTLFCRRCFKYDCFLHPFHATPNTYKRKNTETALDNKPCGPQCYQHLEGAKEFAAALTAERIKTPPKRPGGRRRGRLPNNSSRPSTPTINVLESKDTDSDREAGTETGGENNDKEEEEKKDETSSSSEANSRCQTPIKMKPNIEPPENVEWSGAEASMFRVLIGTYYDNFCAIARLIGTKTCRQVYEFRVKESSIIAPAPAEDVDTPPRKKKRKHRLWAAHCRKIQLKKDGSSNHVYNYQPCDHPRQPCDSSCPCVIAQNFCEKFCQCSSECQNRFPGCRCKAQCNTKQCPCYLAVRECDPDLCLTCGAADHWDSKNVSCKNCSIQRGSKKHLLLAPSDVAGWGIFIKDPVQKNEFISEYCGEIISQDEADRRGKVYDKYMCSFLFNLNNDFVVDATRKGNKIRFANHSVNPNCYAKVMMVNGDHRIGIFAKRAIQTGEELFVDYRYSQADALKYVGIEREMEIP

SEQ ID NO: 233 - DNA, 1960 bp, Homo sapiens
  CDS (139)..(1857)
aagcccggcctggcggcggcggtggcggtagctgccgtggcggcctctgcgcatgctccgtcgcctgcccgccctggccgctcgccgcccgcccgcccgacggagacgcagtcccagctatctgacttcatgtgaaagatggctaatgcagaagtgagtgtcccagtgggggatgtggttgtggtacctactgaaggaaatgaaggggagaatcctgaagacactaaaacccaagtgattttgcagttacagcctgtgcaacaaggtttgtttatcgatggacacttttacaacaggatttatgaagctgggtcggagaacaacacggcagttgtagcagtagaaactcacacgatacacaaaattgaagaagggattgatacaggcactatagaagcaaatgaggatatggaaattgcttaccccataacttgtggggagagcaaagccatcctcctctggaagaagtttgtatgtccaggaataaacgtgaagtgtgtcaagttcaatgatcagttgatcagccccaagcactttgttcatctggctggcaagtccactctgaaggactggaagagagctattcgtctgggtgggatcatgctcaggaaaatgatggactccggacagattgatttttaccaacatgacaaagtttgctccaatacctgcagaagcaccaaatttgatcttctgatcagcagtgcaagagctccagtgccaggacagcagacaagtgtggtgcagacacccacttcggctgatggtagcatcacgcagattgccatctcagaagagagcatggaagaggcagggctggaatggaactcagctctcaccgctgctgtcaccatggccacggaggagggtgtaaagaaagactcagaggaaatttcagaggacactttgatgttctggaaaggaatagctgatgtagggctgatggaagaggttgtctgcaatatacagaaggaaatagaggagctactcaggggagttcagcagcggctcatccaggctcccttccaagtcacagatgctgctgttctcaacaatgtagcacacacatttggcctaatggacacagtcaagaaggttttagacaacagaaggaaccaagtagagcagggagaagaacagtttctctatactctgacagacttggaacgccagttggaggagcagaagaagcaaggccaggatcacaggctgaaatctcagacagttcaaaatgtggtactgatgcctgtgagcactcctaagcctccaaaaaggccccggctccagcggccagcctccaccactgtcttgagcccttctcctcctgtccagcagcctcagttcacagtcatctcacccatcaccatcaccccagtgggtcagtcattttccatgggcaatattccagtggccaccctcagccagggctccagtcctgtgactgtccacacactgccttctggccctcagctcttccgctatgccacagtggtctcctctgccaagagcagctcaccagacacagtgaccatccacccttcatctagcttggcgctgctgagctctactgccatgcaggatgggagtacactgggcaacatgaccaccatggttagccctgtggaattggtggccatggagtccggcctaacctcggcaattcaggctgttgaaagcacctcagaggatgggcagaccatcattgagattgatccagccccggacccagaagctgaagatactgagggcaaagcagtcatcttggagacagagctgaggactgaggagaaagttgtggctgagatggaagaacaccagcatcaagttcacaatgtggagattgtggtcttagaggattaactggggatctcagggccaggagttatgttttgatttggaattttaattatttgtttatttttatcattgtcccactcatttccacataggaccctttttt

SEQ ID NO: 234 - protein, 573 aa, Homo sapiens
MANAEVSVPVGDVVVVPTEGNEGENPEDTKTQVILQLQPVQQGLFIDGHFYNRIYEAGSENNTAVVAVETHTIHKIEEGIDTGTIEANEDMEIAYPITCGESKAILLWKKFVCPGINVKCVKFNDQLISPKHFVHLAGKSTLKDWKRAIRLGGIMLRKMMDSGQIDFYQHDKVCSNTCRSTKFDLLISSARAPVPGQQTSVVQTPTSADGSITQIAISEESMEEAGLEWNSALTAAVTMATEEGVKKDSEEISEDTLMFWKGIADVGLMEEVVCNIQKEIEELLRGVQQRLIQAPFQVTDAAVLNNVAHTFGLMDTVKKVLDNRRNQVEQGEEQFLYTLTDLERQLEEQKKQGQDHRLKSQTVQNVVLMPVSTPKPPKRPRLQRPASTTVLSPSPPVQQPQFTVISPITITPVGQSFSMGNIPVATLSQGSSPVTVHTLPSGPQLFRYATVVSSAKSSSPDTVTIHPSSSLALLSSTAMQDGSTLGNMTTMVSPVELVAMESGLTSAIQAVESTSEDGQTIIEIDPAPDPEAEDTEGKAVILETELRTEEKVVAEMEEHQHQVHNVEIVVLED

SEQ ID NO: 235 - DNA, 1927 bp, Homo sapiens
  CDS (136)..(1824)
aagcccggcctggcggcggcggtggcggtagctgccgtggcggcctctgcgcatgctccgtcgcctgcccgccctggccgctcgccgcccgcccgcccgacggagacgtcccagctatctgacttcatgtgaaagatggctaatgcagaagtgagtgtcccagtgggggatgtggttgtggtacctactgaaggaaatgaaggggagaatcctgaagacactaaaacccaagtgattttgcagttacagcctgtgcaacaagggatttatgaagctgggtcggagaacaacacggcagttgtagcagtagaaactcacacgatacacaaaattgaagaagggattgatacaggcactatagaagcaaatgaggatatggaaattgcttaccccataacttgtggggagagcaaagccatcctcctctggaagaagtttgtatgtccaggaataaacgtgaagtgtgtcaagttcaatgatcagttgatcagccccaagcactttgttcatctggctggcaagtccactctgaaggactggaagagagctattcgtctgggtgggatcatgctcaggaaaatgatggactccggacagattgatttttaccaacatgacaaagtttgctccaatacctgcagaagcaccaaatttgatcttctgatcagcagtgcaagagctccagtgccaggacagcagacaagtgtggtgcagacacccacttcggctgatggtagcatcacgcagattgccatctcagaagagagcatggaagaggcagggctggaatggaactcagctctcaccgctgctgtcaccatggccacggaggagggtgtaaagaaagactcagaggaaatttcagaggacactttgatgttctggaaaggaatagctgatgtagggctgatggaagaggttgtctgcaatatacagaaggaaatagaggagctactcaggggagttcagcagcggctcatccaggctcccttccaagtcacagatgctgctgttctcaacaatgtagcacacacatttggcctaatggacacagtcaagaaggttttagacaacagaaggaaccaagtagagcagggagaagaacagtttctctatactctgacagacttggaacgccagttggaggagcagaagaagcaaggccaggatcacaggctgaaatctcagacagttcaaaatgtggtactgatgcctgtgagcactcctaagcctccaaaaaggccccggctccagcggccagcctccaccactgtcttgagcccttctcctcctgtccagcagcctcagttcacagtcatctcacccatcaccatcaccccagtgggtcagtcattttccatgggcaatattccagtggccaccctcagccagggctccagtcctgtgactgtccacacactgccttctggccctcagctcttccgctatgccacagtggtctcctctgccaagagcagctcaccagacacagtgaccatccacccttcatctagcttggcgctgctgagctctactgccatgcaggatgggagtacactgggcaacatgaccaccatggttagccctgtggaattggtggccatggagtccggcctaacctcggcaattcaggctgttgaaagcacctcagaggatgggcagaccatcattgagattgatccagccccggacccagaagctgaagatactgagggcaaagcagtcatcttggagacagagctgaggactgaggagaaagttgtggctgagatggaagaacaccagcatcaagttcacaatgtggagattgtggtcttagaggattaactggggatctcagggccaggagttatgttttgatttggaattttaattatttgtttatttttatcattgtcccactcatttccacataggaccctttttt

SEQ ID NO: 236 - protein, 563 aa, Homo sapiens
MANAEVSVPVGDVVVVPTEGNEGENPEDTKTQVILQLQPVQQGIYEAGSENNTAVVAVETHTIHKIEEGIDTGTIEANEDMEIAYPITCGESKAILLWKKFVCPGINVKCVKFNDQLISPKHFVHLAGKSTLKDWKRAIRLGGIMLRKMMDSGQIDFYQHDKVCSNTCRSTKFDLLISSARAPVPGQQTSVVQTPTSADGSITQIAISEESMEEAGLEWNSALTAAVTMATEEGVKKDSEEISEDTLMFWKGIADVGLMEEVVCNIQKEIEELLRGVQQRLIQAPFQVTDAAVLNNVAHTFGLMDTVKKVLDNRRNQVEQGEEQFLYTLTDLERQLEEQKKQGQDHRLKSQTVQNVVLMPVSTPKPPKRPRLQRPASTTVLSPSPPVQQPQFTVISPITITPVGQSFSMGNIPVATLSQGSSPVTVHTLPSGPQLFRYATVVSSAKSSSPDTVTIHPSSSLALLSSTAMQDGSTLGNMTTMVSPVELVAMESGLTSAIQAVESTSEDGQTIIEIDPAPDPEAEDTEGKAVILETELRTEEKVVAEMEEHQHQVHNVEIVVLED

SEQ ID NO: 237 - DNA, 1240 bp, Homo sapiens
  CDS (66)..(911)
tgcgcgtgcgcagggataagagagcggtctggacagcgcgtggccggcgccgctgtggggacagcatgagcggcggttggatggcgcaggttggagcgtggcgaacaggggctctgggcctggcgctgctgctgctgctcggcctcggactaggcctggaggccgccgcgagcccgctttccaccccgacctctgcccaggccgcaggccccagctcaggctcgtgcccacccaccaagttccagtgccgcaccagtggcttatgcgtgcccctcacctggcgctgcgacagggacttggactgcagcgatggcagcgatgaggaggagtgcaggattgagccatgtacccagaaagggcaatgcccaccgccccctggcctcccctgcccctgcaccggcgtcagtgactgctctgggggaactgacaagaaactgcgcaactgcagccgcctggcctgcctagcaggcgagctccgttgcacgctgagcgatgactgcattccactcacgtggcgctgcgacggccacccagactgtcccgactccagcgacgagctcggctgtggaaccaatgagatcctcccggaaggggatgccacaaccatggggccccctgtgaccctggagagtgtcacctctctcaggaatgccacaaccatggggccccctgtgaccctggagagtgtcccctctgtcgggaatgccacatcctcctctgccggagaccagtctggaagcccaactgcctatggggttattgcagctgctgcggtgctcagtgcaagcctggtcaccgccaccctcctccttttgtcctggctccgagcccaggagcgcctccgcccactggggttactggtggccatgaaggagtccctgctgctgtcagaacagaagacctcgctgccctgaggacaagcacttgccaccaccgtcactcagccctgggcgtagccggacaggaggagagcagtgatgcggatgggtacccgggcacaccagccctcagagacctgagctcttctggccacgtggaacctcgaacccgagctcctgcagaagtggccctggagattgagggtccctggacactccctatggagatccggggagctaggatggggaacctgccacagccagaactgaggggctggccccaggcagctcccagggggtagaacggccctgtgcttaagacactcctgctgccccgtctgagggtggcgattaaagttgct

SEQ ID NO: 238 - protein, 282 aa, Homo sapiens
MSGGWMAQVGAWRTGALGLALLLLLGLGLGLEAAASPLSTPTSAQAAGPSSGSCPPTKFQCRTSGLCVPLTWRCDRDLDCSDGSDEEECRIEPCTQKGQCPPPPGLPCPCTGVSDCSGGTDKKLRNCSRLACLAGELRCTLSDDCIPLTWRCDGHPDCPDSSDELGCGTNEILPEGDATTMGPPVTLESVTSLRNATTMGPPVTLESVPSVGNATSSSAGDQSGSPTAYGVIAAAAVLSASLVTATLLLLSWLRAQERLRPLGLLVAMKESLLLSEQKTSLP

SEQ ID NO: 239 - DNA, 1810 bp, Homo sapiens
  CDS (177)..(1145)
ggggggaaggccaagcagtgaccaggaagagggagaaacttctgctcagaccgagcgtgtgccactggacctcagtcctcgcctggaggagacgctggacttcggcgaggtggaagtggagcccagtgaggtggaagacttcgaggctcgtgggagccgcttctccaagtctgctgatgagagacagcgcatgctggtcgcagcgtaaggacgaactcctccagcaagctcgcaaacgtttcttgaacaaaagttctgaagatgatgcggcctcagagagcttcctcccctcggaaggtgcgtcctctgaccccgtgaccctgcgtcgaaggatgctggctgccgcgcggaacggaggcttcagaagcagcagacctcctagcgctcccttgccttcctcagctgcctcctgcgccctgtgcccgactgactggaggaggcctgtcccaattctgccgctccatggaaaagcgggcttgactgcattgccgctgtataaagcatgtggtcttatagtgtttggacagctgataaatttaatccttctttgtaatactttctatgtgacatttctcttccccttagaaacactgcaaattttaactgtaggtatgatctcttctggtgttgactggactgcttggggtgggggacgatcaggaggaagtgagccagtcgcctgcctgcagcaggcagcttctactcctgcctcatgcatacgtcccacaaatgcaggtgtcctgagcaccacacccagtgggaagagtgtgggggaggcgcacagtgtgagcccgcccccacgtcgtggggtaacatctgttatcaaactgctgtcgttgttgtggaagcatgtagactgtgccagagccagacccacgggctcatgcacccctgagcagcagggcatcttggaaaaggaactcttggttcgatacctggagcagaggaggggaaagtccagggctatagggtgtgatgaagtcacccctttctgtcccactacatctgggactgactttccgagcctccagtccaaagccggcttgatttccgtgaactctggtgctcctgcatctcatgagtgtgccccatgggtcccctcccctctcagcatttccttgtcccgtctggacctggggagtggttaggcagcaagctttggtttatggttttcattcattggtgaagtaaattaggcagtgctaaagcctgtgggtttggtccttgaacaagatgtgggccttgcaagatgggagagtaaaccttgaagggctttattaaagaaataaaaaagaacttttgtatcttttatcctgggagcactgcgttttcctagctgtgttattcctggtttaattcagcagagaaggtaaggtgtgaacctacctgccttggagaggcccaggtcccaaatctcttcaaattcttcacatgtttaactttaaggatttgaaccatgaagtcataggttacagacctcagttttatgccccattggattacttttttttttttttttttttttttactctttgaaagctttgttttgtggtagtcgcttttgggaagaatccagtattatctacaattattggcaaagtttaaatgtattttacataacggaaagtttttagaatgttgaaaagtaattgaaaaaggtgataggtaaatttttaggcaaagataatttatttcaataaatctttcaaaagccttaccttgaaatgctgttagtaaatttctgtgcattttttttttttaatttgttttgctgagagcatagctatttgtttttattgtaaacccgccc

SEQ ID NO: 240 - protein, 323 aa, Homo sapiens
MRDSACWSQRKDELLQQARKRFLNKSSEDDAASESFLPSEGASSDPVTLRRRMLAAARNGGFRSSRPPSAPLPSSAASCALCPTDWRRPVPILPLHGKAGLTALPLYKACGLIVFGQLINLILLCNTFYVTFLFPLETLQILTVGMISSGVDWTAWGGGRSGGSEPVACLQQAASTPASCIRPTNAGVLSTTPSGKSVGEAHSVSPPPRRGVTSVIKLLSLLWKHVDCARARPTGSCTPEQQGILEKELLVRYLEQRRGKSRAIGCDEVTPFCPTTSGTDFPSLQSKAGLISVNSGAPASHECAPWVPSPLSISLSRLDLGSG

SEQ ID NO: 241 - DNA, 1482 bp, Homo sapiens
  CDS (149)..(835)
ggggtgtccagttggttgccgcggcagtctctccgagcagcgcatttgtcttctaggctgcttggttcgtgcctccgagaaaggggtctcctgctgccagctaagtgtgggagaacttgtgcacgtatctcccctccgaatcccaacgatgggtaacgccagctttggctccaaggaacagaagctgctgaagcggttgcggcttctgcccgccctgcttatcctccgcgccttcaagccccacaggaagatcagagattaccgcgtcgtggtagtcggcaccgctggtgtggggaaaagtacgctgctgcacaagtgggcgagcggcaacttccgtcatgagtacctgccgaccattgaaaatacctactgccagttgctgggctgcagccacggtgtgctttccctgcacatcaccgacagcaagagtggcgacggcaaccgcgctctgcagcgccacgttatagcccggggccacgccttcgtcctggtctactcagtcaccaagaaggaaaccctggaagagctgaaggccttctatgagctgatctgcaagatcaaaggtaacaacctgcataagttccccatcgtgctggtgggcaataaaagtgatgacacccaccgggaggtggccctgaatgatggtgccacctgtgcgatggagtggaattgcgccttcatggagatttcagccaagaccgatgtgaatgtgcaggagctgttccacatgctgctgaattacaagaaaaagcccaccaccggcctccaggagcccgagaagaaatcccagatgcccaacaccactgagaagctgcttgacaagtgcataatcatgtgagccctgggccttaagagccagctcttcctatcctgtagcgtgtagaaaacgtggactcatttcactatgttacatgtacatggttgattttgtgctgttgtttggactgtaacatccatgttgtcaatacgtataccttgtaagtggataacttttctttttcccaggccagagaattcaaattgttaaaacattggcatttgaagaggagaacaaaatgtagcatgatgtatttaaagtaaggcctttagtaatgaatgtaatgagagaaaatgttttgaaaagaacaaaacatcaaaatgaatagaaagaaaaattggaaggcgtccttttggtaacccgattattgtgtattacctttaaatatttcacatcctgtaagtgcttaatcatatcttttaattgtgtatttaagaaaagtgttttcacaacaaaagcttttgataaattgctgcgtgacatatactaaataaaaaaatgaatatgttgatcattaggggtgtgggagcagagaaaattgtgaaagtgactctcactaaagatgttagtagtttctcatgtcatttaaaaatgtttgagtattctgcatagcagtttgtaaaagtgtaacagcttattgacttaataaagcttttcctgcatgc

SEQ ID NO: 242 - protein, 229 aa, Homo sapiens
MGNASFGSKEQKLLKRLRLLPALLILRAFKPHRKIRDYRVVVVGTAGVGKSTLLHKWASGNFRHEYLPTIENTYCQLLGCSHGVLSLHITDSKSGDGNRALQRHVIARGHAFVLVYSVTKKETLEELKAFYELICKIKGNNLHKFPIVLVGNKSDDTHREVALNDGATCAMEWNCAFMEISAKTDVNVQELFHMLLNYKKKPTTGLQEPEKKSQMPNTTEKLLDKCIIM

SEQ ID NO: 243 - DNA, 3270 bp, Homo sapiens
  CDS (123)..(2162)
  misc_feature (1)..(3270): any n is a, g, c, t, unknown, or other
caaaaagtgtgtggaaaggtggattgagggagcgggacccccgcgggacccgagggggcggcaggcggggaacggggagtcagcccgcgctgtgtctcggggccggccggcaggaaggagccatggctctggacgggataaggatgccagatggctgctacgcggacgggacgtgggaactgagtgtccatgtgacggacctgaaccgcgatatcaccctgagagtgaccggcgaggtgcacattggaggcgtgatgcttaagctggtggagaaactcgatgtaaaaaaagattggtctgaccatgctctctggtgggaaaagaagagaacttggcttctgaagacacattggaccttagataagtatggtattcaggcagatgctaagcttcagttcacccctcagcacaaactgctccgcctgcagcttcccaacatgaagtatgtgaaggtgaaagtgaatttctctgatagagtcttcaaagctgtttctgacatctgtaagacttttaatatcagacaccccgaagaactttctctcttaaagaaacccagagatccaacaaagaaaaaaaagaagaagctagatgaccagtctgaagatgaggcacttgaattagaggggcctcttatcactcctggatcaggaagtatatattcaagcccaggactgtatagtaaaacaatgacccccacttatgatgctcatgatggaagccccttgtcaccaacttctgcttggtttggtgacagtgctttgtcagaaggcaatcctggtatacttgctgtcagtcaaccaatcacgtcaccagaaatcttggcaaaaatgttcaagcctcaagctcttcttgataaagcaaaaatcaaccaaggatggcttgattcctcaagatctctcatggaacaagatgtgaaggaaaatgaggccttgctgctccgattcaagtattacagcttttttgatttgaatccaaagtatgatgcaatcagaatcaatcagctttatgagcaggccaaatgggccattctcctggaagagattgaatgcacagaagaagaaatgatgatgtttgcagccctgcagtatcatatcaataagctgtcaatcatgacatcagagaatcatttgaacaacagtgacaaagaagttgatgaagttgatgctgccctttcagacctggagattactctggaagggggtaaaacgtcaacaattttgggtgacattacttccattcctgaacttgctgactacattaaagttttcaagccaaaaaagctgactctgaaaggttacaaacaatattggtgcaccttcaaagacacatccatttcttgttataagagcaaagaagaatccagtggcacaccagctcatcagatgaacctcaggggatgtgaagttaccccagatgtaaacatttcaggccaaaaatttaacattaaactcctgattccagttgcagaaggcatgaatgaaatctggcttcgttgtgacaatgaaaaacagtatgcacactggatggcagcctgcagattagcctccaaaggcaagaccatggcggacagttcttacaacttagaagttcagaatattctttcctttctgaagatgcagcatttaaacccagatcctcagttaataccagagcagatcacgactgatataactcctgaatgtttggtgtctccccgctatctaaaaaagtataagaacaagcagataacagcgagaatcttggaggcccatcagaatgtagctcagatgagtctaattgaagccaagatgagatttattcaagcttggcagtcactacctgaatttggcatcactcacttcattgcaaggttccaagggggcaaaaaagaagaacttattggaattgcatacaacagactgattcggatggatgccagcactggagatgcaattaaaacatggcgtttcagcaacatgaaacagtggaatgtcaactgggaaatcaaaatggtcaccgtagagtttgcagatgaagtacgattgtccttcatttgtactgaagtagattgcaaagtggttcatgaattcattggtggctacatatttctctcaacacgtgcaaaagaccaaaacgagagtttagatgaagagatgttctacaaacttaccagtggttgggtgtgaatagaaatactgtttaatgaaactccacggccataacaatatttaactttaaaagctgtttgttatatgctgcttaataaagtaagcttgaaatttatcattttatcatgaaaacttctttgccttaccagaccagttaatatgtgcactaaacaagcacgactattaatctatcatgttatgatataataaacttgaatttggcacacattccttagggccatgaattgaaaactgaaatagtgggcaaatcaggaacaaaccatcactgatttactgatttaagctagccaaactgtaagaaacaagccatctattttaaagctatccagggcttaacctatatgaactctatttatcatgtctaatgcatgtgatttaatgtatgtttaatttgatatcatgttttaaaatatcctacttctggtagccatttaattcctccccctacccccaaataaatcaggcatgcaggaggcctgatatttagtaatgtcattgtgtttgaccttgaaggaaaatgctattagtccgtcgtgcttnatttgtttttgtccttgaataagcatgttatgtatatngtctcgtgtttttatttttacaccatattgtattacacttttagtattcaccagcataancactgtctgcctaaaatatgcaactctttgcattacaatatgaagtaaagttctatgaagtatgcattttgtgtaactaatgtaaaaacacaaattttataaaattgtacagttttttaaaaactactcacaactagcagatggcttaaatgtagcaatctctgcgttaattaaatgcctttaagagatataattaacgtgcagttttaatatctactaaattaagaatgacttcattatgatcatgatttgccacaatgtccttaactctaatgcctggactggccatgttctagtctgttgcgctgttacaatctgtattggtgctagtcagaaaattcctagctcacatagcccaaaagggtgcgagggagaggtggattaccagtattgttcaataatccatggttcaaagactgtataaatgcattttattttaaataaaagcaaaacttttatttaaa

SEQ ID NO: 244 - protein, 680 aa, Homo sapiens
MALDGIRMPDGCYADGTWELSVHVTDLNRDITLRVTGEVHIGGVMLKLVEKLDVKKDWSDHALWWEKKRTWLLKTHWTLDKYGIQADAKLQFTPQHKLLRLQLPNMKYVKVKVNFSDRVFKAVSDICKTFNIRHPEELSLLKKPRDPTKKKKKKLDDQSEDEALELEGPLITPGSGSIYSSPGLYSKTMTPTYDAHDGSPLSPTSAWFGDSALSEGNPGILAVSQPITSPEILAKMFKPQALLDKAKINQGWLDSSRSLMEQDVKENEALLLRFKYYSFFDLNPKYDAIRINQLYEQAKWAILLEEIECTEEEMMMFAALQYHINKLSIMTSENHLNNSDKEVDEVDAALSDLEITLEGGKTSTILGDITSIPELADYIKVFKPKKLTLKGYKQYWCTFKDTSISCYKSKEESSGTPAHQMNLRGCEVTPDVNISGQKFNIKLLIPVAEGMNEIWLRCDNEKQYAHWMAACRLASKGKTMADSSYNLEVQNILSFLKMQHLNPDPQLIPEQITTDITPECLVSPRYLKKYKNKQITARILEAHQNVAQMSLIEAKMRFIQAWQSLPEFGITHFIARFQGGKKEELIGIAYNRLIRMDASTGDAIKTWRFSNMKQWNVNWEIKMVTVEFADEVRLSFICTEVDCKVVHEFIGGYIFLSTRAKDQNESLDEEMFYKLTSGWV

SEQ ID NO: 245 - DNA, 885 bp, Homo sapiens
  CDS (1)..(882)
atggaagattcgatggacatggacatgagccccctgaggccccagaactatcttttcggttgtgaactaaaggccgacaaagattatcactttaaggtggataatgatgaaaatgagcaccagttatctttaagaacggtcagtttaggggctggtgcaaaggatgagttgcacattgttgaagcagaggcaatgaattacgaaggcagtccaattaaagtaacactggcaactttgaaaatgtctgtacagccaacggtttcccttgggggctttgaaataacaccaccagtggtcttaaggttgaagtgtggttcagggccagtgcatattagtggacagcacttagtagctgtggaggaagatgcagagtcagaagatgaagaggaggaggatgtgaaactcttaagtatatctggaaagcggtctgcccctggaggtggtagcaaggttccacagaaaaaagtaaaacttgctgctgatgaagatgatgacgatgatgatgaagaggatgatgatgaagatgatgatgatgatgattttgatgatgaggaagctgaagaaaaagcgccagtgaagaaatctatacgagatactccagccaaaaatgcacaaaagtcaaatcagaatggaaaagactcaaaaccatcatcaacaccaagatcaaaaggacaagaatccttcaagaaacaggaaaaaactcctaaaacaccaaaaggacctagttctgtagaagacattaaagcaaaaatgcaagcaagtatagaaaaaggtggttctcttcccaaagtggaagccaaattcatcaattatgtgaagaattgcttccggatgactgaccaagaggctattcaagatctctggcagtggaggaagtctctttaa

SEQ ID NO: 246 - protein, 294 aa, Homo sapiens
MEDSMDMDMSPLRPQNYLFGCELKADKDYHFKVDNDENEHQLSLRTVSLGAGAKDELHIVEAEAMNYEGSPIKVTLATLKMSVQPTVSLGGFEITPPVVLRLKCGSGPVHISGQHLVAVEEDAESEDEEEEDVKLLSISGKRSAPGGGSKVPQKKVKLAADEDDDDDDEEDDDEDDDDDDFDDEEAEEKAPVKKSIRDTPAKNAQKSNQNGKDSKPSSTPRSKGQESFKKQEKTPKTPKGPSSVEDIKAKMQASIEKGGSLPKVEAKFINYVKNCFRMTDQEAIQDLWQWRKSL

SEQ ID NO: 247 - DNA, 1085 bp, Homo sapiens
  CDS (76)..(678)
atcctgtctgtccgaacccagacacaagtcttcactccttcctgcgagccctgaggaagccttctttccccagacatggccaacaagggtccttcctatggcatgagccgcgaagtgcagtccaaaatcgagaagaagtatgacgaggagctggaggagcggctggtggagtggatcatagtgcagtgtggccctgatgtgggccgcccagaccgtgggcccttgggcttccaggtgtggctgaagaatggcgtgattctgagcaagctggtgaacagcctgtaccctgatggctccaagccggtgaaggtgcccgagaacccaccctccatggtcttcaagcagatggagcaggtggctcagttcctgaaggcggctgaggactctggggtcatcaagactgacatgttccagactgttgacctctttgaaggcaaagacatggcagcagtgcagaggaccctgatggctttgggcagcttggcagtgaccaagaatgatgggcactaccgtggagatcccaactggtttatgaagaaagcgcaggagcataagagggaattcacagagagccagctgcaggagggaaagcatgtcattggccttcagatgggcagcaacagaggggcctcccaggccggcatgacaggctacggacgacctcggcagatcatcagttagagcggagagggctagccctgagcccggcgctcccccagctccttggctgcagccatcccgcttagcctgcctcacccacacccgtgtggtaccttcagccctggccaagctttgaggctctgtcactgagcaatggtaactgcacctgggcagctcctccctgtgcccccagcctcagcccaacttcttacccgaaagcatcactgccttggcccctccctcccggcggcccccatcacctctactgtctcctccctgggctaagcaggggagaagcgggctgggggtagcctggatgtgggcgaagtccactgtcctccttggcggcaaaagcccattgaagaagaaccagcccagcctgccccctatcttgtacctggaatatttttggggttggaactctc

SEQ ID NO: 248 - protein, 201 aa, Homo sapiens
MANKGPSYGMSREVQSKIEKKYDEELEERLVEWIIVQCGPDVGRPDRGPLGFQVWLKNGVILSKLVNSLYPDGSKPVKVPENPPSMVFKQMEQVAQFLKAAEDSGVIKTDMFQTVDLFEGKDMAAVQRTLMALGSLAVTKNDGHYRGDPNWFMKKAQEHKREFTESQLQEGKHVIGLQMGSNRGASQAGMTGYGRPRQIIS

SEQ ID NO: 249 - DNA, 913 bp, Homo sapiens
  CDS (57)..(512)
agagccggcgccgtcaccgcccgcattgccgctcccagtcccgcgctcggcacgacatgaaatcccccgacgaggtgctacgcgagggcgagttggagaagcgcagcgacagcctcttccagctatggaagaagaagcgcggggtgctcacctccgaccgcctgagcctgttccccgccagcccccgcgcgcgccccaaggagctgcgcttccactccatcctcaaggtggactgcgtggagcgcacgggcaagtacgtgtacttcaccatcgtcaccaccgaccacaaggagatcgacttccgctgcgcgggcgagagctgctggaacgcggccatcgcgctggcgctcatcgatttccagaaccgccgcgccctgcaggactttcgcagccgccaggaacgcaccgcacccgccgcacccgccgaggacgccgtggctgccgcggccgccgcaccctccgagccctcggagccctccaggccatccccgcagcccaaaccccgcacgccatgagcccgccgcgggccatacgctggacgagtcggaccgaggctaggacgtggccggcgctctccagccctgcagcagaagaacttcccgtgcgcgcggatcctcgctccgttgcacgggcgccttaagttattggactatctaatatctatgtatttatttcgctggttctttgtagtcacatattttatagtcttaatatcttgtttttgcatcactgtgcccattgcaaataaatcacttggccagtttgcttttctaccatccggctgtggctcagtgagactcctgctgggagggtggaggcccaggaatgggcgggcaggacaccctcatccagtcatgcggggctggtgtgaaaggcgctgggaaccggctttgaatgaataaatgaatcgtgt

SEQ ID NO: 250 - protein, 152 aa, Homo sapiens
MKSPDEVLREGELEKRSDSLFQLWKKKRGVLTSDRLSLFPASPRARPKELRFHSILKVDCVERTGKYVYFTIVTTDHKEIDFRCAGESCWNAAIALALIDFQNRRALQDFRSRQERTAPAAPAEDAVAAAAAAPSEPSEPSRPSPQPKPRTP

SEQ ID NO: 251 - DNA, 660 bp, Homo sapiens
  CDS (83)..(223)
gatatgatgagaatatggccatcacctgaaaagttttcttatcttctgtgcttttggtccctggaaacaaatccgcctatgtatgaagctagttgatttccagttgcactatttccagttgcctctgaagttcacaggcaatacattgtctagtcctttgcgaatttctctgatttgtgggcacagttatgaagtttccccacatgtgaagacaggtacaaaatagcagagccaagcagacagtgggtctattcttcattagctcagtgacttgtccacactcgtcttagcacttacgtttcaaaagcttgtcacaaacccttggagtcattcccagataatagaactggaaaagataaatcccctaatgccaagggtctagtgtgttcttagtggttatactgggaagtgtgtggagatttaggtgctgctcttgctgctctggatggcttgaaggctcctgggccatcttcatgtgctgcttgaagagctcctattttgtactcctggctagaatgctggtggaacaaatacaaaagtgaaaaaagttctctgtagatttctgaagtgcatattcattgatgccaaggaaaaaaaaaaaaaaaaaaaaaaatttggtcgtctttcgcagccgtaaatcaagccttattccgataccgc

SEQ ID NO: 252 - protein, 47 aa, Homo sapiens
MKLVDFQLHYFQLPLKFTGNTLSSPLRISLICGHSYEVSPHVKTGTK

SEQ ID NO: 253 - DNA, 2636 bp, Homo sapiens
  CDS (158)..(2419)
gcgggctttagcgccttttctggcggcggtagatttgaagcgcttcaaaggaccggacccagagaagaggaaaactctaccggtgcaggagcacagggatcagttgtccttgtttttttttggtcttttcttcatttgaagattaagtattggagccatgggaataaaggttcaacgtcctcgatgtttttttgacattgccattaacaatcaacctgctggaagagttgtctttgaattattttctgatgtgtgccccaaaacatgcgagaactttcgttgtctttgtacaggtgaaaaggggaccgggaaatcaactcagaaaccattacattataagagttgtctctttcacagagttgtcaaggattttatggttcaaggtggtgacttcagtgaaggaaatggacgaggaggggaatctatctatggaggattttttgaagacgagagtttcgctgttaaacacaacaaagaatttctcttgtcaatggccaacagagggaaggatacaaatggttcacagttcttcataacaacgaaaccaactcctcatttagatgggcatcatgttgtttttggacaagtaatctctggtcaagaagttgtaagagagattgaaaaccagaaaacagatgcagctagcaaaccgtttgcggaggtacggatactcagttgtggagagctgattcccaaatctaaagttaagaaagaagaaaagaaaaggcataaatcatcatcatcttcctcctcctcatctagtgactcagatagctcaagtgattctcagtcctcttctgattcctctgattccgaaagtgctactgaagagaaatcaaagaaaagaaaaaagaaacatcggaaaaattcccgaaaacacaagaaagaaaagaaaaagcgaaagaaaagcaagaagagtgcatctagtgagagtgaagctgaaaatcttgaagcacaaccccagtctactgtccgtccagaagagatccctcctatacctgaaaatagattcctaatgagaaaaagtcctcctaaagctgatgagaaggaaaggaaaaacagagagagagaaagggaaagagagtgtaatccacctaactcccagcctgcttcataccagagacgacttttagttactagatctggcaggaaaattaaaggaagaggaccaaggcgttatcgaactccttccagatccagatcaagggatcgtttcagacgtagtgagactcctccacattggaggcaagagatgcagagagctcaaagaatgagggtatcaagtggtgaaagatggatcaagggggataagagtgagttgaatgaaataaaagaaaatcagagaagtccagttagagtaaaagagagaaaaataacagatcacaggaatgtatctgagagtccaaacagaaaaaatgaaaaggagaagaaagttaaagaccataaatctaacagcaaagagagagacatcagaagaaattcagaaaaagatgacaagtataaaaacaaagtgaagaaaagggccaaatctaaaagtaggagtaagagcaaagagaaatcaaagagtaaagaaagagattcaaaacataatagaaatgaagaaaagaggatgaggtcaaggagtaaaggaagggatcatgaaaatgttaaagaaaaagaaaagcagtctgattctaaaggaaaagatcaggaaaggagtagaagtaaagagaagtctaaacagttagaatcaaagagtaatgagcatgatcacagtaaaagtaaggaaaaggatagacgcgcacaatccaggagtagagaatgtgatataactaaaggtaaacacagttataatagcagaacaagagaacgaagcagaagtagggacagaagcagaagagtgcgatcaagaacccatgacagagatcgcagcagaagcaaggagtaccatagatacagagaacaggaatacaggagaagaggacggtcacgaagccgagagagaagaacaccaccaggaagatcaagaagtaaagataggaggagaaggaggagagactcacggagctcagagagagaagaaagtcaaagcagaaacaaagacaaatacagaaaccaagagagtaagagctcacacagaaaagaaaattctgagagtgagaaaagaatgtactctaaaagtcgtgatcataatagctcaaataacagcagggaaaaaaaggctgatagagatcaaagtcccttctcaaaaataaaacaaagcagtcaggacgatgaattaaagtcctccatgttgaaaaataaggaggatgagaagatcagatcctcagtggaaaaagaaaaccaaaaatcaaaaggtcaagaaaatgaccatgtacatgaaaaaaataaaaaatttgatcatgaatcaagccctggaacagatgaagacaaaagcggatgagtgagttatataaacttacttccattctgtttcggattttaagtttgagagacttgctaatgaatctcctttatgttgttttccttttcattgtttttggattgttttatgtttgtccttttttttcttaatgtggatttcattgagttgattttttgataatctgcaatctggataatttgtactgctaaagttttaataaactcgacatgag

SEQ ID NO: 254 - protein, 754 aa, Homo sapiens
MGIKVQRPRCFFDIAINNQPAGRVVFELFSDVCPKTCENFRCLCTGEKGTGKSTQKPLHYKSCLFHRVVKDFMVQGGDFSEGNGRGGESIYGGFFEDESFAVKHNKEFLLSMANRGKDTNGSQFFITTKPTPHLDGHHVVFGQVISGQEVVREIENQKTDAASKPFAEVRILSCGELIPKSKVKKEEKKRHKSSSSSSSSSSDSDSSSDSQSSSDSSDSESATEEKSKKRKKKHRKNSRKHKKEKKKRKKSKKSASSESEAENLEAQPQSTVRPEEIPPIPENRFLMRKSPPKADEKERKNRERERERECNPPNSQPASYQRRLLVTRSGRKIKGRGPRRYRTPSRSRSRDRFRRSETPPHWRQEMQRAQRMRVSSGERWIKGDKSELNEIKENQRSPVRVKERKITDHRNVSESPNRKNEKEKKVKDHKSNSKERDIRRNSEKDDKYKNKVKKRAKSKSRSKSKEKSKSKERDSKHNRNEEKRMRSRSKGRDHENVKEKEKQSDSKGKDQERSRSKEKSKQLESKSNEHDHSKSKEKDRRAQSRSRECDITKGKHSYNSRTRERSRSRDRSRRVRSRTHDRDRSRSKEYHRYREQEYRRRGRSRSRERRTPPGRSRSKDRRRRRRDSRSSEREESQSRNKDKYRNQESKSSHRKENSESEKRMYSKSRDHNSSNNSREKKADRDQSPFSKIKQSSQDDELKSSMLKNKEDEKIRSSVEKENQKSKGQENDHVHEKNKKFDHESSPGTDEDKSG

SEQ ID NO: 255 - DNA, 4380 bp, Homo sapiens
  CDS (84)..(2981)
ggatagcggcagagccggtagcggacggtccttgcattggcctccggcaggcgccccccgggggcgggaagctgcctcacagcatggaaccacaggttactctaaatgtgacttttaaaaatgaaattcaaagctttctggtttctgatccagaaaatacaacttgggctgatatcgaagctatggtaaaagtttcatttgatctgaatactattcaaataaaatacctggatgaggaaaatgaagaggtatccatcaacagtcaaggagaatatgaagaagcgcttaagatggcagttaaacagggaaaccaactgcagatgcaagtccacgaagggcaccatgtcgttgatgaagccccacccccagttgtaggagcaaaacgactagctgccagggcagggaagaagccacttgcacattactcttcactggtgagagtcttgggatcagacatgaagaccccagaggatcctgcagtgcagtcgtttccacttgttccatgtgacacagaccagcctcaagacaagcccccagactggttcacaagctacctggagacgttcagagaacaagtggttaacgaaacggttgagaagcttgaacagaaattacatgaaaagcttgtcctccagaacccatccttgggttcttgtccctcagaagtctcaatgcctacttcagaagaaacattgtttttgccagaaaaccagttcagctggcatattgcttgcaacaactgccaaagaaggattgttggtgtccgctaccagtgtagcctatgcccatcctacaatatctgtgaagattgtgaagcagggccatatggccatgacactaaccacgtcctgctgaagttgcggagacctgttgtgggctcctctgaaccgttctgtcactcaaagtactctactcctcgtcttcctgctgctctggaacaagtcaggctccagaaacaggttgataagaactttcttaaagcagaaaagcaaaggttgcgagctgagaagaaacaacgtaaagcagaggtcaaggaacttaaaaagcagcttaaactccataggaaaattcacctgtggaattcaatccatggactccagagccccaagtctcctttaggccgacctgagagcttgctccagtctaataccctgatgctccctttgcagccctgtacctccgttatgccaatgctcagtgcagcatttgtggatgagaatttgcctgatgggactcaccttcagccaggaaccaagtttatcaaacactggaggatgaaaaatacaggaaatgtaaagtggagtgcagacacaaagctcaagttcatgtggggaaacctgactttggcttccacagaaaagaaggatgttttggttccctgcctcaaggccggccatgtgggagttgtatctgtggagttcattgccccagccttggagggaacgtatacttcccattggcgtctttctcacaaaggccagcaatttgggcctcgggtctggtgcagtatcatagtagatcctttcccctccgaagagagccctgataacattgaaaagggcatgatcagctcaagcaaaactgatgatctcacctgccagcaagaggaaacttttcttctggctaaagaagaaagacagcttggtgaagtgactgagcagacagaagggacagcagcctgcatcccacagaaggcaaaaaatgttgccagtgagagggagctctacatcccatctgtggatcttctgactgcccaggacctgctgtcctttgagctgttggatataaacattgttcaagagttggagagagtgccccacaacacccctgtggatgtgactccctgcatgtctcctctgccacatgacagtcctttaatagagaagccaggcttggggcagatagaggaagagaatgaaggggcaggatttaaagcacttcctgattctatggtgtcagtaaagaggaaggctgagaacattgcttctgtggaggaagcagaagaagacctgagtgggacccagtttgtgtgtgagacagtaatccgatcccttaccttggatgctgccccagaccacaaccctccttgcagacagaagtccttgcagatgacatttgccttgcctgaaggaccacttggaaatgagaaggaggagattatccatatcgctgaggaagaagctgtcatggaggaggaggaggatgaggaggatgaggaggaggaggatgagctcaaagatgaagttcaaagtcagtcctctgcttcctcagaggattacatcatcatcctgcctgagtgctttgataccagccgccccctgggggattctatgtacagctctgcgctctcacagccaggcctggagcgaggtgctgaaggcaagcctggggttgaggctgggcaggaaccagctgaggctggggaaagactccctggaggggagaaccagccacaggagcacagcataagtgacatcctcacgacctcacagactctggaaacagtgcccctaatcccagaggtagtggagcttccaccgtcactgcccaggagctctccttgtgtacatcatcatggttccccaggagtggatttaccagttaccataccagaagtttcttcagtccctgatcagatcagaggagagcccagaggctcatcaggacttgtaaacagcagacagaagagctatgaccactcaaggcaccatcatgggagcagcattgctggaggactggtgaagggggctttgtctgttgctgcctctgcatacaaggccctgtttgctgggccaccagtcactgcacagccaataatttctgaagatcagacagcagccctgatggcccatctctttgaaatgggattctgtgacaggcagctgaacctacggctgctgaagaaacacaattacaatatcctgcaggttgtgacagaacttcttcagttaaacaacaacgactggtacagccaacgctattgaggagtgaccttgtattaaataactgcctgctgctcagagatgatctttattctgtcattggggtatgggatagaagcccttgcttatttttaatctgatgaatctgtatagagcccatcgttgagttaccaagacaatacctgctacagtattttggggagcaaactaaagaccagaacttaaattttcactttagacattggatgaatagtatgaagacagtttttcagttgatttggataaaactattttagtgcattgacaagtgtaacttcaacttcatatagaaccatttttctttctgcttttattgaaactgagtatttttctttggctaatgtggattttttatggggatatctgttaattttcaggttttgaaagacattaacctcggaagttgtttttaagaattattctcataattcttattctcataatttctgtaatccacctcaagcttcatagttatttggcattgaaataacacccagagcatgatagaaatgttgttactcttcctctctcaaggagaaagtaattttcctgcaatacttaataattggcaccgttgctttctaaagactccatggtgcattcaagagtatccaacttcaagggaatctccgcatttcaatgaaaggaggaagagtgtgctgataaacctaccagcacctattgagcaatgtctattatagtaattttgcatacatttttatttaagggaaaaaatataggtattgtgaaatattttgctaatcttatagaaaaggaaaaaatcccgttatttaaagggaaaagtaaatttaacagttgccttttttcttaatgtcagggcagatcttattttacagtacagtgggggaaatagaaaacatgtgaaaggcaaaaggcaggctcctaaattaatgtcagtgaagttcagggtgggcaaatgagtgtgtgtgaggtataggaaatgctgatgacttctttaatgcttgaagtccgttcacaggtatctagccctagaatgcctagaacaggaagaggcagctggtgttctgcaaaacttggacaggggcaaagttgctgaaaaagttttggtttaacccgaagataagtggaaaagagcttgtccatgaacccaggttctcactctgtttacagaagtgtgttgagtacagttggtgaaggaagaggtaacaaaaaatgctaaatattttatccatgaaaatgacttccagaaaaggaagaatatgaaccccagaccgaaggggaaaagatagttaatagtattatctaacctggttggtatttgtaatgaatggtgattttaattagtcattagccataatgatgtttatttacagtataactcctgaatgctacttaaataaaccaggattcaaactgc

SEQ ID NO: 256 - protein, 966 aa, Homo sapiens
MEPQVTLNVTFKNEIQSFLVSDPENTTWADIEAMVKVSFDLNTIQIKYLDEENEEVSINSQGEYEEALKMAVKQGNQLQMQVHEGHHVVDEAPPPVVGAKRLAARAGKKPLAHYSSLVRVLGSDMKTPEDPAVQSFPLVPCDTDQPQDKPPDWFTSYLETFREQVVNETVEKLEQKLHEKLVLQNPSLGSCPSEVSMPTSEETLFLPENQFSWHIACNNCQRRIVGVRYQCSLCPSYNICEDCEAGPYGHDTNHVLLKLRRPVVGSSEPFCHSKYSTPRLPAALEQVRLQKQVDKNFLKAEKQRLRAEKKQRKAEVKELKKQLKLHRKIHLWNSIHGLQSPKSPLGRPESLLQSNTLMLPLQPCTSVMPMLSAAFVDENLPDGTHLQPGTKFIKHWRMKNTGNVKWSADTKLKFMWGNLTLASTEKKDVLVPCLKAGHVGVVSVEFIAPALEGTYTSHWRLSHKGQQFGPRVWCSIIVDPFPSEESPDNIEKGMISSSKTDDLTCQQEETFLLAKEERQLGEVTEQTEGTAACIPQKAKNVASERELYIPSVDLLTAQDLLSFELLDINIVQELERVPHNTPVDVTPCMSPLPHDSPLIEKPGLGQIEEENEGAGFKALPDSMVSVKRKAENIASVEEAEEDLSGTQFVCETVIRSLTLDAAPDHNPPCRQKSLQMTFALPEGPLGNEKEEIIHIAEEEAVMEEEEDEEDEEEEDELKDEVQSQSSASSEDYIIILPECFDTSRPLGDSMYSSALSQPGLERGAEGKPGVEAGQEPAEAGERLPGGENQPQEHSISDILTTSQTLETVPLIPEVVELPPSLPRSSPCVHHHGSPGVDLPVTIPEVSSVPDQIRGEPRGSSGLVNSRQKSYDHSRHHHGSSIAGGLVKGALSVAASAYKALFAGPPVTAQPIISEDQTAALMAHLFEMGFCDRQLNLRLLKKHNYNILQVVTELLQLNNNDWYSQRY

SEQ ID NO: 257 - DNA, 4756 bp, Homo sapiens
  CDS (460)..(3357)
ccaaggtcagaatcgccacctgaggcctgaatatcagcgtaagatagtgtccaaagcagtcttaagaagaggtcccattaccccactctttccgccctaatggaggtctccagtttaggtaaataaaaggattgttgggaggtggagggaaagaactactatttccaacatgcattgcggaacgaaaggccttggccacactgttccttggaaactgtagtcttatggagaggaacatccaataccaaagcgggcacaattctcacggaaatccagtggatagattggagacctccgcgggcttatacatgtcaacagtaatggattggagtgttgttatgttctcctatcttgagagcagagactaggccaaaaaaagatacctacaactcctaggaagactacgattcccatccagccccacgagtctcgggcaagtagtcctctaagcctcacagcatggaaccacaggttactctaaatgtgacttttaaaaatgaaattcaaagctttctggtttctgatccagaaaatacaacttgggctgatatcgaagctatggtaaaagtttcatttgatctgaatactattcaaataaaatacctggatgaggaaaatgaagaggtatccatcaacagtcaaggagaatatgaagaagcgcttaagatggcagttaaacagggaaaccaactgcagatgcaagtccacgaagggcaccatgtcgttgatgaagccccacccccagttgtaggagcaaaacgactagctgccagggcagggaagaagccacttgcacattactcttcactggtgagagtcttgggatcagacatgaagaccccagaggatcctgcagtgcagtcgtttccacttgttccatgtgacacagaccagcctcaagacaagcccccagactggttcacaagctacctggagacgttcagagaacaagtggttaacgaaacggttgagaagcttgaacagaaattacatgaaaagcttgtcctccagaacccatccttgggttcttgtccctcagaagtctcaatgcctacttcagaagaaacattgtttttgccagaaaaccagttcagctggcatattgcttgcaacaactgccaaagaaggattgttggtgtccgctaccagtgtagcctatgcccatcctacaatatctgtgaagattgtgaagcagggccatatggccatgacactaaccacgtcctgctgaagttgcggagacctgttgtgggctcctctgaaccgttctgtcactcaaagtactctactcctcgtcttcctgctgctctggaacaagtcaggctccagaaacaggttgataagaactttcttaaagcagaaaagcaaaggttgcgagctgagaagaaacaacgtaaagcagaggtcaaggaacttaaaaagcagcttaaactccataggaaaattcacctgtggaattcaatccatggactccagagccccaagtctcctttaggccgacctgagagcttgctccagtctaataccctgatgctccctttgcagccctgtacctccgttatgccaatgctcagtgcagcatttgtggatgagaatttgcctgatgggactcaccttcagccaggaaccaagtttatcaaacactggaggatgaaaaatacaggaaatgtaaagtggagtgcagacacaaagctcaagttcatgtggggaaacctgactttggcttccacagaaaagaaggatgttttggttccctgcctcaaggccggccatgtgggagttgtatctgtggagttcattgccccagccttggagggaacgtatacttcccattggcgtctttctcacaaaggccagcaatttgggcctcgggtctggtgcagtatcatagtagatcctttcccctccgaagagagccctgataacattgaaaagggcatgatcagctcaagcaaaactgatgatctcacctgccagcaagaggaaacttttcttctggctaaagaagaaagacagcttggtgaagtgactgagcagacagaagggacagcagcctgcatcccacagaaggcaaaaaatgttgccagtgagagggagctctacatcccatctgtggatcttctgactgcccaggacctgctgtcctttgagctgttggatataaacattgttcaagagttggagagagtgccccacaacacccctgtggatgtgactccctgcatgtctcctctgccacatgacagtcctttaatagagaagccaggcttggggcagatagaggaagagaatgaaggggcaggatttaaagcacttcctgattctatggtgtcagtaaagaggaaggctgagaacattgcttctgtggaggaagcagaagaagacctgagtgggacccagtttgtgtgtgagacagtaatccgatcccttaccttggatgctgccccagaccacaaccctccttgcagacagaagtccttgcagatgacatttgccttgcctgaaggaccacttggaaatgagaaggaggagattatccatatcgctgaggaagaagctgtcatggaggaggaggaggatgaggaggatgaggaggaggaggatgagctcaaagatgaagttcaaagtcagtcctctgcttcctcagaggattacatcatcatcctgcctgagtgctttgataccagccgccccctgggggattctatgtacagctctgcgctctcacagccaggcctggagcgaggtgctgaaggcaagcctggggttgaggctgggcaggaaccagctgaggctggggaaagactccctggaggggagaaccagccacaggagcacagcataagtgacatcctcacgacctcacagactctggaaacagtgcccctaatcccagaggtagtggagcttccaccgtcactgcccaggagctctccttgtgtacatcatcatggttccccaggagtggatttaccagttaccataccagaagtttcttcagtccctgatcagatcagaggagagcccagaggctcatcaggacttgtaaacagcagacagaagagctatgaccactcaaggcaccatcatgggagcagcattgctggaggactggtgaagggggctttgtctgttgctgcctctgcatacaaggccctgtttgctgggccaccagtcactgcacagccaataatttctgaagatcagacagcagccctgatggcccatctctttgaaatgggattctgtgacaggcagctgaacctacggctgctgaagaaacacaattacaatatcctgcaggttgtgacagaacttcttcagttaaacaacaacgactggtacagccaacgctattgaggagtgaccttgtattaaataactgcctgctgctcagagatgatctttattctgtcattggggtatgggatagaagcccttgcttatttttaatctgatgaatctgtatagagcccatcgttgagttaccaagacaatacctgctacagtattttggggagcaaactaaagaccagaacttaaattttcactttagacattggatgaatagtatgaagacagtttttcagttgatttggataaaactattttagtgcattgacaagtgtaacttcaacttcatatagaaccatttttctttctgcttttattgaaactgagtatttttctttggctaatgtggattttttatggggatatctgttaattttcaggttttgaaagacattaacctcggaagttgtttttaagaattattctcataattcttattctcataatttctgtaatccacctcaagcttcatagttatttggcattgaaataacacccagagcatgatagaaatgttgttactcttcctctctcaaggagaaagtaattttcctgcaatacttaataattggcaccgttgctttctaaagactccatggtgcattcaagagtatccaacttcaagggaatctccgcatttcaatgaaaggaggaagagtgtgctgataaacctaccagcacctattgagcaatgtctattatagtaattttgcatacatttttatttaagggaaaaaatataggtattgtgaaatattttgctaatcttatagaaaaggaaaaaatcccgttatttaaagggaaaagtaaatttaacagttgccttttttcttaatgtcagggcagatcttattttacagtacagtgggggaaatagaaaacatgtgaaaggcaaaaggcaggctcctaaattaatgtcagtgaagttcagggtgggcaaatgagtgtgtgtgaggtataggaaatgctgatgacttctttaatgcttgaagtccgttcacaggtatctagccctagaatgcctagaacaggaagaggcagctggtgttctgcaaaacttggacaggggcaaagttgctgaaaaagttttggtttaacccgaagataagtggaaaagagcttgtccatgaacccaggttctcactctgtttacagaagtgtgttgagtacagttggtgaaggaagaggtaacaaaaaatgctaaatattttatccatgaaaatgacttccagaaaaggaagaatatgaaccccagaccgaaggggaaaagatagttaatagtattatctaacctggttggtatttgtaatgaatggtgattttaattagtcattagccataatgatgtttatttacagtataactcctgaatgctacttaaataaaccaggattcaaactgc

SEQ ID NO: 258 - protein, 966 aa, Homo sapiens; identical to SEQ ID NO: 256

SEQ ID NO: 259 - DNA, 4654 bp, Homo sapiens
  CDS (141)..(3038)
agtaattgctgtaccaaggtcagaatcgccacctgaggcctgaatatcagcgtaagatagtgtccaaagcagtcttaagaagaggtcccattaccccactctttccgccctaatggaggtctccagtttagcctcacagcatggaaccacaggttactctaaatgtgacttttaaaaatgaaattcaaagctttctggtttctgatccagaaaatacaacttgggctgatatcgaagctatggtaaaagtttcatttgatctgaatactattcaaataaaatacctggatgaggaaaatgaagaggtatccatcaacagtcaaggagaatatgaagaagcgcttaagatggcagttaaacagggaaaccaactgcagatgcaagtccacgaagggcaccatgtcgttgatgaagccccacccccagttgtaggagcaaaacgactagctgccagggcagggaagaagccacttgcacattactcttcactggtgagagtcttgggatcagacatgaagaccccagaggatcctgcagtgcagtcgtttccacttgttccatgtgacacagaccagcctcaagacaagcccccagactggttcacaagctacctggagacgttcagagaacaagtggttaacgaaacggttgagaagcttgaacagaaattacatgaaaagcttgtcctccagaacccatccttgggttcttgtccctcagaagtctcaatgcctacttcagaagaaacattgtttttgccagaaaaccagttcagctggcatattgcttgcaacaactgccaaagaaggattgttggtgtccgctaccagtgtagcctatgcccatcctacaatatctgtgaagattgtgaagcagggccatatggccatgacactaaccacgtcctgctgaagttgcggagacctgttgtgggctcctctgaaccgttctgtcactcaaagtactctactcctcgtcttcctgctgctctggaacaagtcaggctccagaaacaggttgataagaactttcttaaagcagaaaagcaaaggttgcgagctgagaagaaacaacgtaaagcagaggtcaaggaacttaaaaagcagcttaaactccataggaaaattcacctgtggaattcaatccatggactccagagccccaagtctcctttaggccgacctgagagcttgctccagtctaataccctgatgctccctttgcagccctgtacctccgttatgccaatgctcagtgcagcatttgtggatgagaatttgcctgatgggactcaccttcagccaggaaccaagtttatcaaacactggaggatgaaaaatacaggaaatgtaaagtggagtgcagacacaaagctcaagttcatgtggggaaacctgactttggcttccacagaaaagaaggatgttttggttccctgcctcaaggccggccatgtgggagttgtatctgtggagttcattgccccagccttggagggaacgtatacttcccattggcgtctttctcacaaaggccagcaatttgggcctcgggtctggtgcagtatcatagtagatcctttcccctccgaagagagccctgataacattgaaaagggcatgatcagctcaagcaaaactgatgatctcacctgccagcaagaggaaacttttcttctggctaaagaagaaagacagcttggtgaagtgactgagcagacagaagggacagcagcctgcatcccacagaaggcaaaaaatgttgccagtgagagggagctctacatcccatctgtggatcttctgactgcccaggacctgctgtcctttgagctgttggatataaacattgttcaagagttggagagagtgccccacaacacccctgtggatgtgactccctgcatgtctcctctgccacatgacagtcctttaatagagaagccaggcttggggcagatagaggaagagaatgaaggggcaggatttaaagcacttcctgattctatggtgtcagtaaagaggaaggctgagaacattgcttctgtggaggaagcagaagaagacctgagtgggacccagtttgtgtgtgagacagtaatccgatcccttaccttggatgctgccccagaccacaaccctccttgcagacagaagtccttgcagatgacatttgccttgcctgaaggaccacttggaaatgagaaggaggagattatccatatcgctgaggaagaagctgtcatggaggaggaggaggatgaggaggatgaggaggaggaggatgagctcaaagatgaagttcaaagtcagtcctctgcttcctcagaggattacatcatcatcctgcctgagtgctttgataccagccgccccctgggggattctatgtacagctctgcgctctcacagccaggcctggagcgaggtgctgaaggcaagcctggggttgaggctgggcaggaaccagctgaggctggggaaagactccctggaggggagaaccagccacaggagcacagcataagtgacatcctcacgacctcacagactctggaaacagtgcccctaatcccagaggtagtggagcttccaccgtcactgcccaggagctctccttgtgtacatcatcatggttccccaggagtggatttaccagttaccataccagaagtttcttcagtccctgatcagatcagaggagagcccagaggctcatcaggacttgtaaacagcagacagaagagctatgaccactcaaggcaccatcatgggagcagcattgctggaggactggtgaagggggctttgtctgttgctgcctctgcatacaaggccctgtttgctgggccaccagtcactgcacagccaataatttctgaagatcagacagcagccctgatggcccatctctttgaaatgggattctgtgacaggcagctgaacctacggctgctgaagaaacacaattacaatatcctgcaggttgtgacagaacttcttcagttaaacaacaacgactggtacagccaacgctattgaggagtgaccttgtattaaataactgcctgctgctcagagatgatctttattctgtcattggggtatgggatagaagcccttgcttatttttaatctgatgaatctgtatagagcccatcgttgagttaccaagacaatacctgctacagtattttggggagcaaactaaagaccagaacttaaattttcactttagacattggatgaatagtatgaagacagtttttcagttgatttggataaaactattttagtgcattgacaagtgtaacttcaacttcatatagaaccatttttctttctgcttttattgaaactgagtatttttctttggctaatgtggattttttatggggatatctgttaattttcaggttttgaaagacattaacctcggaagttgtttttaagaattattctcataattcttattctcataatttctgtaatccacctcaagcttcatagttatttggcattgaaataacacccagagcatgatagaaatgttgttactcttcctctctcaaggagaaagtaattttcctgcaatacttaataattggcaccgttgctttctaaagactccatggtgcattcaagagtatccaacttcaagggaatctccgcatttcaatgaaaggaggaagagtgtgctgataaacctaccagcacctattgagcaatgtctattatagtaattttgcatacatttttatttaagggaaaaaatataggtattgtgaaatattttgctaatcttatagaaaaggaaaaaatcccgttatttaaagggaaaagtaaatttaacagttgccttttttcttaatgtcagggcagatcttattttacagtacagtgggggaaatagaaaacatgtgaaaggcaaaaggcaggctcctaaattaatgtcagtgaagttcagggtgggcaaatgagtgtgtgtgaggtataggaaatgctgatgacttctttaatgcttgaagtccgttcacaggtatctagccctagaatgcctagaacaggaagaggcagctggtgttctgcaaaacttggacaggggcaaagttgctgaaaaagttttggtttaacccgaagataagtggaaaagagcttgtccatgaacccaggttctcactctgtttacagaagtgtgttgagtacagttggtgaaggaagaggtaacaaaaaatgctaaatattttatccatgaaaatgacttccagaaaaggaagaatatgaaccccagaccgaaggggaaaagatagttaatagtattatctaacctggttggtatttgtaatgaatggtgattttaattagtcattagccataatgatgtttatttacagtataactcctgaatgctacttaaataaaccaggattcaaactgcaagccagccaggccgttcattatttaaaacgttttaatcggggcttccgggtagaaggtggagcggcagggtgtaattgggttgatgggtgggacctgtcttgaccatcggagttttataatcgagggccaggagggcccgggttgctctcctggttatgtatgtacttgtacataaccaccttaagaatggtgaaataaatgttcttggaaattcc

SEQ ID NO: 260 - protein, 966 aa, Homo sapiens; identical to SEQ ID NO: 256

SEQ ID NO: 261 - DNA, 1434 bp, Homo sapiens
  CDS (12)..(1034)
agtgcgcgaagatgcgaaaggtggttttgatcaccggggctagcagtggcattggcctggccctctgcaagcggctgctggcggaagatgatgagcttcatctgtgtttggcgtgcaggaacatgagcaaggcagaagctgtctgtgctgctctgctggcctctcaccccactgctgaggtcaccattgtccaggtggatgtcagcaacctgcagtcggtcttccgggcctccaaggaacttaagcaaaggtttcagagattagactgtatatatctaaatgctgggatcatgcctaatccacaactaaatatcaaagcacttttctttggcctcttttcaagaaaagtgattcatatgttctccacagctgaaggcctgctgacccagggtgataagatcactgctgatggacttcaggaggtgtttgagaccaatgtctttggccattttatcctgattcgggaactggagcctctcctctgtcacagtgacaatccatctcagctcatctggacatcatctcgcagtgcaaggaaatctaatttcagcctcgaggacttccagcacagcaaaggcaaggaaccctacagctcttccaaatatgccactgaccttttgagtgtggctttgaacaggaacttcaaccagcagggtctctattccaatgtggcctgtccaggtacagcattgaccaatttgacatatggaattctgcctccgtttatatggacgctgttgatgccggcaatattgctacttcgcttttttgcaaatgcattcactttgacaccatataatggaacagaagctctggtatggcttttccaccaaaagcctgaatctctcaatcctctgatcaaatatctgagtgccaccactggctttggaagaaattatattatgacccagaagatggacctagatgaagacactgctgaaaaattttatcaaaagttactggaactggaaaagcacattagggtcactattcaaaaaacagataatcaggccaggctcagtggctcatgcctataattccagcactttgggaggccaaggcagaaggatcacttgagaccaggagttcaagaccagcctgagaaacatagtgagcccttgtctctacaaaaagaaataaaaataatagctgggtgtggtggcatgcgcatgtagtcccagctactcagaaggatgaggtgggaggatctcttgaggctgggaggcagaggttgcagtgagctgagattgtgccactgcactccagcctgggtgacagcgagaccctgtctcaaaatatgtatatatttaatatatatataaaaccagagctgacaatgacactctggaacattgcataccttctgtacattctggggtacatggatttctactgagttggataatatgcatttgtaataaactatgaactatg

SEQ ID NO: 262 - protein, 341 aa, Homo sapiens
MRKVVLITGASSGIGLALCKRLLAEDDELHLCLACRNMSKAEAVCAALLASHPTAEVTIVQVDVSNLQSVFRASKELKQRFQRLDCIYLNAGIMPNPQLNIKALFFGLFSRKVIHMFSTAEGLLTQGDKITADGLQEVFETNVFGHFILIRELEPLLCHSDNPSQLIWTSSRSARKSNFSLEDFQHSKGKEPYSSSKYATDLLSVALNRNFNQQGLYSNVACPGTALTNLTYGILPPFIWTLLMPAILLLRFFANAFTLTPYNGTEALVWLFHQKPESLNPLIKYLSATTGFGRNYIMTQKMDLDEDTAEKFYQKLLELEKHIRVTIQKTDNQARLSGSCL

SEQ ID NO: 263 - DNA, 1231 bp, Homo sapiens
  CDS (92)..(805)
gaattccagaaaagaggtggagagggggggaataagaaagagagagaaggaaaggagagaaggcaggaagaaggcaagggacgagacaaccatgctgtgctgtatgagaagaaccaaacaggttgaaaaaaatgatgacgaccaaaagattgaacaagatggtatcaaaccagaagataaagctcataaggccgcaaccaaaattcaggctagcttccgtggacacataacaaggaaaaagctcaaaggagagaagaaggatgatgtccaagctgctgaggctgaagctaataagaaggatgaagcccctgttgccgatggggtggagaagaagggagaaggcaccactactgccgaagcagccccagccactggctccaagcctgatgagcccggcaaagcaggagaaactccttccgaggagaagaagggggagggtgatgctgccacagagcaggcagccccccaggctcctgcatcctcagaggagaaggccggctcagctgagacagaaagtgccactaaagcttccactgataactcgccgtcctccaaggctgaagatgccccagccaaggaggagcctaaacaagccgatgtgcctgctgctgtcactgctgctgctgccaccacccctgccgcagaggatgctgctgccaaggcaacagcccagcctccaacggagactggggagagcagccaagctgaagagaacatagaagctgtagatgaaaccaaacctaaggaaagtgcccggcaggacgagggtaaagaagaggaacctgaggctgaccaagaacatgcctgaactctaagaaatggctttccacatccccaccctcccctctcctgagcctgtctctccctaccctcttctcagctccactctgaagtcccttcctgtcctgctcacgtctgtgagtctgtcctttcccacccactagccctctttctctctgtgtggcaaacatttaaaaaaaaaaaaaaaaagcaggaaagatcccaagtcaaacagtgtggcttaaacattttttgtttcttggtgttgttatggcaagtttttggtaatgatgattcaatcattttgggaaattcttgcactgtatccaagttatttgatctggtgcgtgtggccctgtgggagtccactttcctctctctctctctctctgttccaagtgtgtgtgcaatgttccgttcatctgaggagtccaaaatattgagtgaattc

SEQ ID NO: 264 - protein, 238 aa, Homo sapiens
MLCCMRRTKQVEKNDDDQKIEQDGIKPEDKAHKAATKIQASFRGHITRKKLKGEKKDDVQAAEAEANKKDEAPVADGVEKKGEGTTTAEAAPATGSKPDEPGKAGETPSEEKKGEGDAATEQAAPQAPASSEEKAGSAETESATKASTDNSPSSKAEDAPAKEEPKQADVPAAVTAAAATTPAAEDAAAKATAQPPTETGESSQAEENIEAVDETKPKESARQDEGKEEEPEADQEHA

SEQ ID NO: 265 - DNA, 813 bp, Homo sapiens
  CDS (39)..(578)
acgaggccagcctccgcagcccaaccgccgccagcaccatggccagcaccatttccgcctacaaggagaagatgaaggagctgtcggtgctgtcgctcatctgctcctgcttctacacacagccgcaccccaataccgtctaccagtacggggacatggaggtgaagcagctggacaagcgggcctcaggccagagcttcgaggtcatcctcaagtccccttctgacctgtccccagagagccctatgctcccctccccacccaagaagaaggacacctccctggaggagctgcaaaagcggctggaggcagccgaggagcggaggaagacgcaggaggcgcaggtgctgaagcagctggcggagcggcgcgagcacgagcgcgaggtgctgcacaaggcgctggaggagaataacaacttcagccgccaggcggaggagaagctcaactacaagatggagctcagcaaggagatccgcgaggcacacctggccgcactgcgcgagcggctgcgcgagaaggagctgcacgctgccgaggtgcgcaggaacaaggagcagcgagaagagatgtcgggctaagggggcgacggcgcccatcctgctgacggaacacgttcgggttttggttttgtttcgttcacctctgtctagatgcaacttttgttcctcctcccccaccccagcccccagcttcatgcttctcttccgcactcagccgccctgccctgtcctcgtggtgagtcgctgaccacggcttcccctgcaggagccgccggggtgagacgcggtccctcggtgcagacaccaggcc

SEQ ID NO: 266 - protein, 180 aa, Homo sapiens
MASTISAYKEKMKELSVLSLICSCFYTQPHPNTVYQYGDMEVKQLDKRASGQSFEVILKSPSDLSPESPMLPSPPKKKDTSLEELQKRLEAAEERRKTQEAQVLKQLAERREHEREVLHKALEENNNFSRQAEEKLNYKMELSKEIREAHLAALRERLREKELHAAEVRRNKEQREEMSG

SEQ ID NO: 267 - DNA, 1353 bp, Homo sapiens
  CDS (1)..(1350)
atggggaaatccttcgccaacttcatgtgcaagaaagactttcatcctgcctccaaatccaatatcaaaaaagtatggatggcagaacagaaaatatcatatgataagaagaaacaagaagaattgatgcagcaatatcttagagaacaagaatcatatgataatagattgcttatgggagatgaacgtgtaaagaatggccttaatttcatgtatgaagccccaccaggagctaaaaaagaaaacaaagagaaagaagaaacagaaggagagaccgaatacaaatttgaatggcagaaaggagccccacgagaaaaatatgccaaagatgacatgagcatcagagatcagccctttggtattcaggttcgaaatgtgaggtgcattaaatgtcacaaatggggtcatgtcaacacagatcgagaatgtcctttgtttggtctttctggaatcaatgcaagttcggttcccactgatggctcagggccatcgatgcacccctcggagctaatagcggagatgagaaacagtgggtttgcactgaaacgaaatgtactggggagaaacttgaccgcaaatgatccatcacaggagtatgttgcaagtgagggtgaagaagatccagaagttgaatttttaaagtcactaacaaccaaacaaaaacagaaacttctcaggaaattagatcgactggagaagaaaaaaaagaaaaaagatagaaaaaagaaaaagtttcagaagagcagaagtaaacacaaaaaacataagtcctcttcttcctcatcttcctcctcctcctcctcttcctctactgagacttcagaaagcagtagtgagagtgagagtaacaataaagaaaaaaaaatacaaaggaagaaaagaaagaaaaacaagtgttcagggcataacaacagtgattctgaagagaaggacaagtctaagaagagaaagcttcatgaagaactttctagcactcaccataaccgggaaaaagccaaggaaaagcccaggttcttaaaacacgagagttctagggaggacagcaaatggagccattctgattctgacaaaaagtccagaacccataaacatagcccagagaagagaggctctgaaagaaaggaggggagcagcagaagccacggcagggaggaaaggagccggagaagccggagcagaagtcctggtagttacaagcaaagggagacaaggaaacgggcacagcgaaatcctggtgaagagcaaagcagaagaaatgacagcagaagccatggcacagacttgtatagaggagaaaaaatgtacagagagcacccaggaggtacacatactaaagtgacacaaagagaatga

SEQ ID NO: 268 - protein, 450 aa, Homo sapiens
MGKSFANFMCKKDFHPASKSNIKKVWMAEQKISYDKKKQEELMQQYLREQESYDNRLLMGDERVKNGLNFMYEAPPGAKKENKEKEETEGETEYKFEWQKGAPREKYAKDDMSIRDQPFGIQVRNVRCIKCHKWGHVNTDRECPLFGLSGINASSVPTDGSGPSMHPSELIAEMRNSGFALKRNVLGRNLTANDPSQEYVASEGEEDPEVEFLKSLTTKQKQKLLRKLDRLEKKKKKKDRKKKKFQKSRSKHKKHKSSSSSSSSSSSSSSTETSESSSESESNNKEKKIQRKKRKKNKCSGHNNSDSEEKDKSKKRKLHEELSSTHHNREKAKEKPRFLKHESSREDSKWSHSDSDKKSRTHKHSPEKRGSERKEGSSRSHGREERSRRSRSRSPGSYKQRETRKRAQRNPGEEQSRRNDSRSHGTDLYRGEKMYREHPGGTHTKVTQRE

SEQ ID NO: 269 - DNA, 2212 bp, Homo sapiens
  CDS (108)..(1823)
ccgccgccacagctgcagtcagcaccgtcaccccagcagcatccgccgcctgcaccgcgcgtgcggcccgccccggcctgaccccgccgccgaacccggcgccagccatggagcccgaagccccccgtcgccgccacacccatcagcgcggctacctgctgacacggaaccctcacctcaacaaggacttggcctttaccctggaagagagacagcaattgaacattcatggattgttgccaccttccttcaacagtcaggagatccaggttcttagagtagtaaaaaatttcgagcatctgaactctgactttgacaggtatcttctcttaatggatctccaagatagaaatgaaaaactcttttatagagtgctgacatctgacattgagaaattcatgcctattgtttatactcccactgtgggtctggcttgccaacaatatagtttggtgtttcggaagccaagaggtctctttattactatccacgatcgagggcatattgcttcagttctcaatgcatggccagaagatgtcatcaaggccattgtggtgactgatggagagcgtattcttggcttgggagaccttggctgtaatggaatgggcatccctgtgggtaaattggctctatatacagcttgcggagggatgaatcctcaagaatgtctgcctgtcattctggatgtgggaaccgaaaatgaggagttacttaaagatccactctacattggactacggcagagaagagtaagaggttctgaatatgatgattttttggacgaattcatggaggcagtttcttccaagtatggcatgaattgccttattcagtttgaagattttgccaatgtgaatgcatttcgtctcctgaacaagtatcgaaaccagtattgcacattcaatgatgatattcaaggaacagcatctgttgcagttgcaggtctccttgcagctcttcgaataaccaagaacaaactgtctgatcaaacaatactattccaaggagctggagaggctgccctagggattgcacacctgattgtgatggccttggaaaaagaaggtttaccaaaagagaaagccatcaaaaagatatggctggttgattcaaaaggattaatagttaagggacgtgcttccttaacacaagagaaagagaagtttgcccatgaacatgaagaaatgaagaacctagaagccattgttcaagaaataaaaccaactgccctcataggagttgctgcaattggtggtgcattctcagaacaaattctcaaagatatggctgccttcaatgaacggcctattatttttgctttgagtaatccaactagcaaagcagaatgttctgcagagcagtgctacaaaataaccaagggacgtgcaatttttgccagtggcagtccttttgatccagtcactcttccaaatggacagaccctatatcctggccaaggcaacaattcctacgtgttccctggagttgctcttggtgttgtggcgtgtggattgaggcagatcacagataatattttcctcactactgctgaggttatagctcagcaagtgtcagataaacacttggaagagggtcggctttatcctcctttgaataccattagagatgtttctctgaaaattgcagaaaagattgtgaaagatgcataccaagaaaagacagccacagtttatcctgaaccgcaaaacaaagaagcatttgtccgctcccagatgtatagtactgattatgaccagattctacctgattgttattcttggcctgaagaggtgcagaaaatacagaccaaagttgaccagtaggataatagcaaacatttctaactctattaatgaggtctttaaacctttcataatttttaaaggttggaatcttttataatgattcataagacacttagattaagattttactttaacagtctaaaaattgatagaagaatatcgatataaattgggataaacatcacatgagacaattttgcttcactttgccttctggttatttatggtttctgtctgaattattctgcctacgttctctttaaaagctgttgtacgtactacggagaaactcatcatttttatacaggacactaatgggaagaccaaaattactaataaattgaaataaccaacattaaaactcataattattttgttgaccattttgttaaaatctacttttc

SEQ ID NO: 270 - protein, 572 aa, Homo sapiens
MEPEAPRRRHTHQRGYLLTRNPHLNKDLAFTLEERQQLNIHGLLPPSFNSQEIQVLRVVKNFEHLNSDFDRYLLLMDLQDRNEKLFYRVLTSDIEKFMPIVYTPTVGLACQQYSLVFRKPRGLFITIHDRGHIASVLNAWPEDVIKAIVVTDGERILGLGDLGCNGMGIPVGKLALYTACGGMNPQECLPVILDVGTENEELLKDPLYIGLRQRRVRGSEYDDFLDEFMEAVSSKYGMNCLIQFEDFANVNAFRLLNKYRNQYCTFNDDIQGTASVAVAGLLAALRITKNKLSDQTILFQGAGEAALGIAHLIVMALEKEGLPKEKAIKKIWLVDSKGLIVKGRASLTQEKEKFAHEHEEMKNLEAIVQEIKPTALIGVAAIGGAFSEQILKDMAAFNERPIIFALSNPTSKAECSAEQCYKITKGRAIFASGSPFDPVTLPNGQTLYPGQGNNSYVFPGVALGVVACGLRQITDNIFLTTAEVIAQQVSDKHLEEGRLYPPLNTIRDVSLKIAEKIVKDAYQEKTATVYPEPQNKEAFVRSQMYSTDYDQILPDCYSWPEEVQKIQTKVDQ

SEQ ID NO: 271 - DNA, 5516 bp, Homo sapiens
  CDS (35)..(1561)
ccggccggaattccggctggatttcctcccggacatgacggtcgagggccgcctgctcgttcctgacagaattaacggcacagccaacaagatgaacggagctttggatcactcagaccaaccagacccagatgccattaagatgtttgtcggacagatcccccggtcatggtcggaaaaggagctgaaagaactttttgagccttacggagccgtctaccagatcaacgtcctccgggaccggagtcagaaccctccgcagagtaaaggttgttgtttcgtaacattttatacaagaaaagctgcacttgaggcccagaatgcactgcacaatattaaaactttacctgggatgcatcatcccattcagatgaaacctgcagatagtgaaaagtccaacgctgtggaagacagaaaattgttcataggaatggtttcgaagaaatgtaatgagaacgacatcagggtgatgttctctccatttggccagatagaagaatgccggatcctccggggacctgatgggctgagtcgaggctgtgcgtttgtcacattttctacaagggcaatggcacagaatgcaatcaaagccatgcatcagtctcagaccatggagggctgctcttcacctatcgtggtgaagtttgctgacactcagaaggacaaagagcaaaggcgcctccagcagcagctcgctcagcagatgcagcagctcaacactgccacctgggggaacctgacagggctgggcggactgaccccacagtatctggcgctcctgcagcaggccacctcctccagcaacctgggtgcgttcagcggcattcaacaaatggcaggcatgaatgctttacagttgcagaacctggcgacgctggctgctgctgcagctgcggcccagacctcagccaccagcaccaatgcaaaccctctctctaccacgagcagcgccctgggagccctcacgagtcccgtggctgcttcaacccccaactccactgctggtgcagccatgaactccttgacctctctcgggactctgcaaggactggctggagccactgttggactgaataatattaatgcactagcagttgctcaaatgctctcaggtatggcggctctgaatggaggacttggcgccacaggcttgacgaatggcacggctggcaccatggacgccctcacccaggcctactcaggaattcaacagtacgcagccgccgcgctgcccactctgtacagccagagcctgctgcagcagcagagcgctgcaggcagccagaaggaaggtccagagggggcaaacctctttatttaccaccttccacaggaatttggagaccagcacattctgcagatgttcatgccttttggaaatgttatctctgctaaagtcttcattgacaaacagaccaatctgagcaagtgctttggttttgttagctacgacaatccagtctctgcacaagctgctatccaagctatgaatggctttcagatcggcatgaaacgcttgaaggtgcagctgaagcgttccaaaaacgacagcaaaccttactgatcctaaccccagaggctccctgctctcattttagctttcttaggacatcttcatgcccgttagttcatcgtttgcctagcatgtccctgtggcgtctcaaaaaaaagtttcatcgtcccgtcattgtttctgatgtctttctgacctcacatcatatttggttctcctactgacctttgatctagtttgacctttgaaatttgcatgtgacctcatctagctatgaattctgggaagtcaatgtgaaaaacattgctgcattcatgcaagactgaaatttattattagacaaattcattatagaaaaaacctgtggcaaaaacgtttctttcttattttttttcttttcctaaaacagacttgaaagtattatacagggattggcattcttcccggtcactggtaacaatagcaatatgtgtccagggacacagaatgttggtttctaacagactacttccaaaaacagtttgagaaaaaaactgtctgattttaagtctctagaggtctgtaatagtttttacatttttcaggcagtgtaaagttttttgataaggccattttaggtggctcactttctcattaagatatatatatagaaccactttttgtagattagtataagaaaaatatttaccctgttttggggcaaatgctacctatttgtgtcaccttttgctgaactcacagttagacaatccatggtttaatgcacatgaaattacctatattttatactgtttcaatgtacaggagaaaggttactgtaaactgtgttatgttggtgcttctgtgaattaagttgtggtttcatcatgagtcttaatgttctttgttgataagacaagtttagaattggtttacttaatacaaaaaaaaaaaaaagaatttcaaaaaaaaaagttgtttgcttaaaaaaaatttcatgtgagggaaaaaaaaaaaaacctattccagaataagttttgtgttggcttgtgaagcattgatgtcattttttttaattgtggactatttagatgtgtttgtgttcagcaaaatgtgatctgtttttttcttttaaagaaaaaaagtgaaaatatatagtgccaaattccaaaggtacttccttcctagagcttcagtgtgtttcttgtgagaagtaatttgataacatgggtattttattatgtgttttgtataaatccctaatatttaaaaaaaaaaacaaaacaaaaaaaggttacaaagtttgttaacttgctatcctgtggtcttgttgcctgaaattgttattgtttgttatttctctctgatgttttttgtaagacattgtataagtgcccatgtcccacttttttaaccactccgcacatcagtgctgtgaaggcaacctcaccatgtattttcttcataatctatggaaacctctaaggtgagaaagttttgaacttttaaccctttctacccagagctatctggaatgttgatgactttttatactgtcatgatttgagtttgttttggggtgtttccaatttggatttttttccctgcatctatcctctaagttgtttcggtttgactactttgttctttggttaagatccaaaagaaaacagaaaacaattccacgaggccaatctaaagggaaaaaatcctacactacttttactacttttgattatttctcatttttgggaaaagaattcctaatgtgctactagaattccttcttcagttttaacgagtaattggataaaccctgagggaaaacggaggtagattcagcacctaacaatcctgtatgcttttgagatcacgtttagtgctatgtcctagtctagaatattttcatataccttgcagtaaaaccactttgtggcaggacagtctcttgaggggttttgtttctgtttcctaaatactcctaaataatatttctaatcagccattatgctggggcatctctgatcccagtaggtacctctgaatataccaggtgtctggagttagaagcccatagccctttcccagcctttttggtttttttaattgaacacatttcatctaagtaaagctcagttctttatcacaatttactgaccaaatacctagcaccagttcctgctgccactttttaaagtgccatatgactttctacgaacaggtaccttgctgtcttgacaaatcctaatgtcacgcctacagccccaacacaagctccagtcttcctcttcggcatgccctggaagcttcttggcctcagctccccttccccgctcagcaccctgttaggatcagtgtgtgtggatgggatagccctgggatggaaaggactagcctctactgatgcaaaaaaacaaaaagcaacacaaacgtttccttcttatagcacatgcacttccttacaatgacatgatttgtattatcctcacatgtgtttactactgctggggccttccttcatcctctgagggctattttgtactttctgcagcaatcagcttaataacaacacttattgcacctgtctctctctgagaacacggtgtgtctcgacacgtaccacgtaacgtggaaacacaagagcccaccacttgaatttctaagaccatttcattctgaaacttcttatcaattacctaaatctcaacgaaaaacaatttactgaagccgactcccctccccatctccctctcaacctcaacccacctgcatgcatctcccccagaggaaaacactgagggtaggggacagggaggctcaggacgcgccctctgaatcggagtgtttcttcttcacaagtcaccaagagaggacatgagggggaaagtccttttttgcccttctccaaaaaataaccttccacagagacaaactgtccttctatccacttttatcttttaataaatatcaaaaggaaaaagctgcaagggtgcaaagggcctgtgccagaagaaaacacacacagggaaaccgctttttttaatcaattgtagagaatagtcatttttaatctaaattagagaattgtgatacaatggcagtcctcaaaggcgtaacgagttcatctttctttcaccataggggttatagttggcttgtgctactctggaatcattttactgtttgtttttattatcttaagtgctaattaaaaaaaaaataaaattttaaaaaaacctgtagtttcattacctttttgaataatgtcatacaaaaaatgtatttgtttttttgtgctgtgagaattgatgtttgtagattaataatcattttgtttagaattacaaaatagtttttaaatattgtctgagaaaagccaaagttaatgcaacctagtggaaactgtaagaccatttgagtattgtttgttttattgatgcatttggattttgttgtttgatggaatttgagccaaaaaaaaaaatacgcaggctttcctatttctacaactgattgtacttatgcattttgtaccagtggaactttttatactggagattaaaaaaaaaatggaaatttttgtggcttgctctggtgggcccctgacaatgactgatttcaagtttgatttcgggttgattgattgattgattgatagaaagaaagttgcttttcttttgagaattaaaaactttggcttgatttcttttttccctttgcttatatctagcattagaattttgtcttaaaataacagcggtaagtttcactttttattctgtattgtgcagttacacaataaggtaattagatttagaagtactcagtcactttaagtggataaatgtattagttaaaactttagggtttgcttttttgctgtttagatcaaagttttttctgattcttctgtcctcattgtgaacataaccgtgtagttgaaacagtcaaacttatttttgtaatgtatgttattgtgtgatgcagtttttttgcttctgtctccaatattaaaccattttcc

SEQ ID NO: 272 - protein, 509 aa, Homo sapiens
MTVEGRLLVPDRINGTANKMNGALDHSDQPDPDAIKMFVGQIPRSWSEKELKELFEPYGAVYQINVLRDRSQNPPQSKGCCFVTFYTRKAALEAQNALHNIKTLPGMHHPIQMKPADSEKSNAVEDRKLFIGMVSKKCNENDIRVMFSPFGQIEECRILRGPDGLSRGCAFVTFSTRAMAQNAIKAMHQSQTMEGCSSPIVVKFADTQKDKEQRRLQQQLAQQMQQLNTATWGNLTGLGGLTPQYLALLQQATSSSNLGAFSGIQQMAGMNALQLQNLATLAAAAAAAQTSATSTNANPLSTTSSALGALTSPVAASTPNSTAGAAMNSLTSLGTLQGLAGATVGLNNINALAVAQMLSGMAALNGGLGATGLTNGTAGTMDALTQAYSGIQQYAAAALPTLYSQSLLQQQSAAGSQKEGPEGANLFIYHLPQEFGDQHILQMFMPFGNVISAKVFIDKQTNLSKCFGFVSYDNPVSAQAAIQAMNGFQIGMKRLKVQLKRSKNDSKPY

SEQ ID NO: 273 - DNA, 1779 bp, Homo sapiens
  CDS (147)..(1421)
aagcgcctgtctgaacctctgccagtcctggagactggtgccctgagctccaaccagcgggcctcatctacaccctcaccaccgcaacttctcacccgagcaagaagcagctcccagagagaaagaacgttcccacctgcctagccatgggagaggacgctgcacaggccgaaaagttccagcaccctgggtctgacatgcggcaggaaaagccctcgagccccagcccgatgccttcctccacaccaagccccagcctgaacctagggaacacagaggaggccatccgggacaactcacaggtgaacgcagtcacggtgctcacgctcctggacaagctggtgaacatgctagacgctgtgcaggagaaccagcacaagatggagcagcgacagatcagtttggagggctccgtgaagggcatccagaatgacctcaccaagctctccaagtaccaggcctccaccagcaacacggtgagcaagctgctggagaagtcccgcaaggtcagcgcccacacgcgcgcggtcaaagagcgcatggataggcagtgcgcacaggtgaagcggctggagaacaaccacgcccagctcctccgacgcaaccatttcaaagtgctcatcttccaggaggaaaatgagatccctgccagcgtgtttgtgaaacagcccgtttccggtgccgtggaagggaaggaggagcttccggatgaaaacaaatccctggaggaaaccctgcacaccgtggacctctcctcagatgatgatttgccccacgatgaggaggccctggaagacagtgccgaggaaaaggtggaagaaagtagggcagagaaaataaaaagatccagcctgaagaaagtggatagcctcaagaaagcattttctcgccagaacatcgagaaaaagatgaacaagctggggacaaagatcgtatctgtagagaggagagagaagattaagaaatctctcacgtcaaatcaccagaaaatatcctcaggaaaaagctcccccttcaaggtttctcccctcactttcgggcggaagaaagtccgagagggagaaagccatgcagaaaatgagaccaagtcagaagacctgcctagcagtgagcagatgccaaatgaccaggaagaggagtcctttgcagagggtcattccgaagcgtccctcgccagcgctctggtggaaggggaaattgcagaggaggctgctgagaaggcgacctccagggggagtaactcggggatggacagcaacatcgacttgactattgtggaagatgaagaggaggagtcagtggccctggaacaggcacagaaggtacgctatgagggtagctacgcgctaacatccgaggaggcggagcgctccgatggggaccccgtgcagcccgccgtgctccaggtgcaccagacctcctgagcttagagccaccgtgccatcctgtgctgtgctcaagcgggcagccagggctgaagaacaaactcttgcacatctccagcacgactcacccactcctgcgttcctgtccaggcagtaatcattgaccatatagtcatagtaagacacacgagaccaggctttaccatgaaagcgacctgtcacggactccacttttaatttgctcttaggttctatctctgtagaatgtctccaagattgaagaagaaactgagcagttgaaaaatgctaatctctttgacttagtcagaaaaaaacagaggataattaagatactagtcatgaaaagtgattcattcttttttgtcattccatc

SEQ ID NO: 274 - protein, 425 aa, Homo sapiens
MGEDAAQAEKFQHPGSDMRQEKPSSPSPMPSSTPSPSLNLGNTEEAIRDNSQVNAVTVLTLLDKLVNMLDAVQENQHKMEQRQISLEGSVKGIQNDLTKLSKYQASTSNTVSKLLEKSRKVSAHTRAVKERMDRQCAQVKRLENNHAQLLRRNHFKVLIFQEENEIPASVFVKQPVSGAVEGKEELPDENKSLEETLHTVDLSSDDDLPHDEEALEDSAEEKVEESRAEKIKRSSLKKVDSLKKAFSRQNIEKKMNKLGTKIVSVERREKIKKSLTSNHQKISSGKSSPFKVSPLTFGRKKVREGESHAENETKSEDLPSSEQMPNDQEEESFAEGHSEASLASALVEGEIAEEAAEKATSRGSNSGMDSNIDLTIVEDEEEESVALEQAQKVRYEGSYALTSEEAERSDGDPVQPAVLQVHQTS

SEQ ID NO: 275 - DNA, 1334 bp, Homo sapiens
  CDS (14)..(598)
gcagacccccatcatgggcagccagagctccaaggctccccggggcgacgtgaccgccgaggaggcagcaggcgcttcccccgcgaaggccaacggccaggagaatggccacgtgaaaagcaatggagacttatcccccaagggtgaaggggagtcgccccctgtgaacggaacagatgaggcagccggggccactggcgatgccatcgagccagcaccccctagccagggtgctgaggccaagggggaggtcccccccaaggagacccccaagaagaagaagaaattctctttcaagaagcctttcaaattgagcggcctgtccttcaagagaaatcggaaggagggtgggggtgattcttctgcctcctcacccacagaggaagagcaggagcagggggagatcggtgcctgcagcgacgagggcactgctcaggaagggaaggccgcagccacccctgagagccaggaaccccaggccaagggggcagaggctagtgcagcctcagaagaagaggcagggccccaggctacagagccatccactccctcggggccggagagtggccctacaccagccagcgctgagcagaatgagtagctaggtaggggcaggtgggtgatctctaagctgcaaaaactgtgctgtccttgtgaggtcactgcctggacctggtgccctggctgccttcctgtgcccagaaaggaaggggctattgcctcctcccagccacgttccctttcctcctctccctcctgtggattctcccatcagccatctggttctcctcttaaggccagttgaagatggtcccttacagcttcccaagttaggttagtgatgtgaaatgctcctgtccctggccctacctccttccctgtccccacccctgcataaggcagttgttggttttcttccccaattcttttccaagtaggttttgtttaccctactccccaaatccctgagccagaagtggggtgcttatactcccaaaccttgagtgtccagccttcccctgttgtttttagtctcttgtgctgtgcctagtggcacctgggctggggaggacactgccccgtctaggtttttataaatgtcttactcaagttcaaacctccagcctgtgaatcaactgtgtctcttttttgacttggtaagcaagtattaggctttggggtggggggaggtctgtaatgtgaaacaacttcttgtctttttttctcccactgttgtaaataacttttaatggccaaaccccagatttgtactttttttttttttctaactgctaaaaccattctcttccacctggttttactgtaacatttgg

SEQ ID NO: 276 - protein, 195 aa, Homo sapiens
MGSQSSKAPRGDVTAEEAAGASPAKANGQENGHVKSNGDLSPKGEGESPPVNGTDEAAGATGDAIEPAPPSQGAEAKGEVPPKETPKKKKKFSFKKPFKLSGLSFKRNRKEGGGDSSASSPTEEEQEQGEIGACSDEGTAQEGKAAATPESQEPQAKGAEASAASEEEAGPQATEPSTPSGPESGPTPASAEQNE

SEQ ID NO: 277 - DNA, 1066 bp, Homo sapiens
  CDS (47)..(772)
gcagcgcagggagccaggcgggctgccggcgggtgtgaagaaaaaaatgacactccaatgggctgcagtggcaacctttctttatgccgaaataggactcattttaatcttctgcctactttttattcctcctcagagatggcagaagattttttcatttaatgtctggggtaaaattgcaactttttggaacaaggctttccttaccattatcatcctattgattgttctatttctagatgctgtgagagaagtaaggaaatattcctcagttcataccattgagaagagctccaccagcagacctgatgcctatgaacacacacagatgaaactttttaggtctcaaagaaatctttcaatactttctggattctcgttatttttttggctagtgttgagacgtctggttacgcttattactcaactggcaaaagaacgttcaaacaaaggtgtacttaaaactcaagcagaaaatactaacaaggctgccaaaaaatttatggaagaaaacgaaaaactaaaaaggattttgaaaagccatggtaaagatgaagaatgtgttttggaagcagaaaataaaaaactagtagaagaccaggagaaactgaaaactgaattaaggaagacttcagatgccctttctaaggcacaaaatgatgtgatggaaatgaagatgcagtcagagagactttcgaaagaatatgatcaactcctgaaagaacactctgaacttcaggatcgtttagaaagaggcaacaagaaaagactgtgaactttataaaagacacttgcaatatactgtgtcaaaatgataattttgttatgttagcctctagaaaatttaagttcagaaaaatgcactatgaccggttcgtaatttttttaatgccacacataggttgtattgtaatggcattatcaaaatatttgatgatgtttcagatatattgcaaagtctgtattccagctcttaagaaaaatataagcatgttaaataccatatttacatattgataatgtcattggtatatggtggctgtttaccaataaaaggaaaaaattc

SEQ ID NO: 278 - protein, 242 aa, Homo sapiens
MTLQWAAVATFLYAEIGLILIFCLLFIPPQRWQKIFSFNVWGKIATFWNKAFLTIIILLIVLFLDAVREVRKYSSVHTIEKSSTSRPDAYEHTQMKLFRSQRNLSILSGFSLFFWLVLRRLVTLITQLAKERSNKGVLKTQAENTNKAAKKFMEENEKLKRILKSHGKDEECVLEAENKKLVEDQEKLKTELRKTSDALSKAQNDVMEMKMQSERLSKEYDQLLKEHSELQDRLERGNKKRL

SEQ ID NO: 279 - DNA, 1266 bp, Homo sapiens
  CDS (12)..(914)
gcgcgagcaagatggccaccaccaagcgcgtcttgtacgtgggtggactggcagaggaagtggacgacaaagttcttcatgctgcgttcattccttttggagacatcacagatattcagattcctctggattatgaaacagaaaagcaccgaggatttgcttttgttgaatttgagttggcagaggatgctgcagcagctatcgacaacatgaatgaatctgagctttttggacgtacaattcgtgtcaatttggccaaaccaatgagaattaaggaaggctcttccaggccagtttggtcagatgatgactggttgaagaagttttctgggaagacgcttgaagagaataaagaggaagaagggtcagagcctcccaaagcagagacccaggagggagagcccattgctaaaaaggcccgctcaaatcctcaggtgtacatggacatcaagattgggaacaagccggctggccgcatccagatgctcctgcgttctgatgtcgtgcccatgacagcagagaatttccgctgcctgtgcactcatgaaaagggctttggctttaagggaagcagcttccaccgcatcatcccccagttcatgtgccagggcggtgatttcacaaaccacaatggcactgggggcaagtccatctatgggaagaagttcgatgatgaaaactttatcctcaagcatacgggaccaggtctactatccatggccaactctggcccaaacaccaatggctctcagttcttcctgacatgtgacaagacagactggctggatggcaagcatgtggtgtttggagaggtcaccgaaggcctagatgtcttgcggcaaattgaggcccagggcagcaaggacgggaagccaaagcagaaggtgatcatcgccgactgtggggagtacgtgtgaggcggcactctctctgcttccccctccgctcttgaccctgcatatccaggaaggaactgccagcctcagaggaggcagcaccgagggtgcctgtttgaagcaagcagcatttgggatatgtgcccttcctcagggtctgcttggagcagctcctctgcaggcacagcctggactattcccaggcacagctgtgggcccaggagccagctcaggtgctcccctccaccatgggcaggctgtgcaaaaaagccactggcttttctcagcatttgctgctgggcctctcctgggactaccagtgtggctcttacgtgttttctttgctaaaataaaccctagttcttatatt

SEQ ID NO: 280 - protein, 301 aa, Homo sapiens
MATTKRVLYVGGLAEEVDDKVLHAAFIPFGDITDIQIPLDYETEKHRGFAFVEFELAEDAAAAIDNMNESELFGRTIRVNLAKPMRIKEGSSRPVWSDDDWLKKFSGKTLEENKEEEGSEPPKAETQEGEPIAKKARSNPQVYMDIKIGNKPAGRIQMLLRSDVVPMTAENFRCLCTHEKGFGFKGSSFHRIIPQFMCQGGDFTNHNGTGGKSIYGKKFDDENFILKHTGPGLLSMANSGPNTNGSQFFLTCDKTDWLDGKHVVFGEVTEGLDVLRQIEAQGSKDGKPKQKVIIADCGEYV

SEQ ID NO: 281 - DNA, 1861 bp, Homo sapiens
  CDS (139)..(1725)
ggggggggagatgcagtagccgaaaactgcgcggaggcacgagaggccggggagagcgttctgggtccgagggtccaggtaggggttgagccaccatctgaccgcaagctgcgtcgtgtcgccttctctgcaggcaccatgagccaggacaccgaggtggatatgaaggaggtggagctgaatgagttagagcccgagaagcagccgatgaacgcggcgtctggggcggccatgtccctggcggaagccgagaagaatggtctggtgaagatcaaggtggcggaagacgaggcggaggcggcagccgcggctaagttcacgggcctgtccaaggaggagctgctgaaggtggcaggcagccccggctgggtacgcacccgctgggcactgctgctgctcttctggctcggctggctcggcatgcttgctggtgccgtggtgataatcgtgcgagcgccgcgttgtcgcgagctaccggcgcagaagtggtggcacacgggccccctctaccgcatcggcgaccttcaggccttccagggccacggcgcgggcaacctggcgggtctgaaggggcgtctcgattacctgagctctctgaaggtgaagggccttgtgctgggtccaattcacaagaaccagaaggatgatgtcgctcagactgacttgctgcagatcgaccccaattttggctccaaggaagattttgacagtctcttgcaatcggctaaaaaaaagagcatccgtgtcattctggaccttactcccaactaccggggtgacaactcgtggttctccactcaggttgacactgtggccaccaaggtgaaggatgctctggagttttggctgcaagctggcgtggatgggttccaggttcgggacatagagaatctgaaggatgcatcctcattcttggctgagtggcaaaatatcaccaagggcttcagtggagacaggctcttgattgcggggactaactcctccgaccttcagcagatcctgagcctactcgaatccaacaaagacttgctgttgactagctcatacctgtctgattctggttctactccccagcatacaaaatccctagtcacacagtatttgaatgccactggcaatcgctggtgcagctggagtttgtctcaggcaaggctcctgacttccttcttgccggctcaacttctccgactctaccagctgatgctcttcaccctgccagggacccctcttttcagctacggggatgagattggcctggatgcagctgcccttcctccacagcctatggaggctccagtcatgctgtgggatgagtccagcttccctgacatcccaggggctgtaagtgccaacatgactgtgaagggccagagtgaagaccctggctccctcctttccttgttccggcggctgagtgaccagcggagtaaggagcgctccctactgcatggggacttccacgcgttctccgctgggcctggactcttctcctatatccgccactgggaccagaatgagcgttttctggtagtgcttaactttggggatgtgggcctctcggctggactgcaggcctccgacctgcctgccagcgccagcctgccagccaaggctgacctcctgctcagcacccagccaggccgtgaggagggctcccctcctgagctgggacgcctgaaactggagcctcacgaagggctgctgctccgcttcccctacgcggcctgacctcagcctgacatggacccactacccttctcctttccttcccaggccctttggcttctgattttttttctcttttttaaaacaaacaaacaaactgttgcagattatgagtgaaccccaaatagggtgtttt

SEQ ID NO: 282 - protein, 529 aa, Homo sapiens
MSQDTEVDMKEVELNELEPEKQPMNAASGAAMSLAEAEKNGLVKIKVAEDEAEAAAAAKFTGLSKEELLKVAGSPGWVRTRWALLLLFWLGWLGMLAGAVVIIVRAPRCRELPAQKWWHTGPLYRIGDLQAFQGHGAGNLAGLKGRLDYLSSLKVKGLVLGPIHKNQKDDVAQTDLLQIDPNFGSKEDFDSLLQSAKKKSIRVILDLTPNYRGDNSWFSTQVDTVATKVKDALEFWLQAGVDGFQVRDIENLKDASSFLAEWQNITKGFSGDRLLIAGTNSSDLQQILSLLESNKDLLLTSSYLSDSGSTPQHTKSLVTQYLNATGNRWCSWSLSQARLLTSFLPAQLLRLYQLMLFTLPGTPLFSYGDEIGLDAAALPPQPMEAPVMLWDESSFPDIPGAVSANMTVKGQSEDPGSLLSLFRRLSDQRSKERSLLHGDFHAFSAGPGLFSYIRHWDQNERFLVVLNFGDVGLSAGLQASDLPASASLPAKADLLLSTQPGREEGSPPELGRLKLEPHEGLLLRFPYAA

SEQ ID NO: 283 - DNA, 847 bp, Homo sapiens
  CDS (108)..(722)
ctcaaacaccgcctgctaaaaatacccgactggaggagcataaaagcgcagccgagcccagcgccccgcacttttctgagcagacgtccagagcagagtcagccagcatgaccgagcgccgcgtccccttctcgctcctgcggggccccagctgggaccccttccgcgactggtacccgcatagccgcctcttcgaccaggccttcgggctgccccggctgccggaggagtggtcgcagtggttaggcggcagcagctggccaggctacgtgcgccccctgccccccgccgccatcgagagccccgcagtggccgcgcccgcctacagccgcgcgctcagccggcaactcagcagcggggtctcggagatccggcacactgcggaccgctggcgcgtgtccctggatgtcaaccacttcgccccggacgagctgacggtcaagaccaaggatggcgtggtggagatcaccggcaagcacgaggagcggcaggacgagcatggctacatctcccggtgcttcacgcggaaatacacgctgccccccggtgtggaccccacccaagtttcctcctccctgtcccctgagggcacactgaccgtggaggcccccatgcccaagctagccacgcagtccaacgagatcaccatcccagtcaccttcgagtcgcgggcccagcttgggggcccagaagctgcaaaatccgatgagactgccgccaagtaaagccttagcctggatgcccacccctgctgccgccactggctgtgcctcccccgccacctgtgtgttcttttgatacatttatcttctgtttttctcaaataaagttcaaagcaaccacctgt

SEQ ID NO: 284 - protein, 205 aa, Homo sapiens
MTERRVPFSLLRGPSWDPFRDWYPHSRLFDQAFGLPRLPEEWSQWLGGSSWPGYVRPLPPAAIESPAVAAPAYSRALSRQLSSGVSEIRHTADRWRVSLDVNHFAPDELTVKTKDGVVEITGKHEERQDEHGYISRCFTRKYTLPPGVDPTQVSSSLSPEGTLTVEAPMPKLATQSNEITIPVTFESRAQLGGPEAAKSDETAAK

SEQ ID NO: 285 - DNA, 1718 bp, Homo sapiens
  CDS (114)..(1601)
ggtcggaggagcagatcacgcttgcgaaggcggtctcgatcacgcggtggtcgtagacgaaggagcagaagcaaagtaaggaagataaatttaaaggaagtctttctgaaggaatgaaagttgagcaggaatcttcgtctgatgataaccttgaagactttgatgtagaggaagaagatgaagaagccctaatagaacagagaagaatccaaaggcaggcaattgttcagaaatataaataccttgctgaagatagcaacatgtctgtgccatctgaaccaagcagcccccagagcagtacgagaacacgatcaccatctccagatgacattctggagcgagtagctgctgatgttaaagagtatgaacgggaaaatgttgatacatttgaggcctcagtgaaagccaagcataatctaatgacagttgaacagaataatggttcatctcagaagaagttgttggcacctgatatgtttacagaatctgatgatatgtttgctgcgtattttgatagtgctcgtcttcgggccgctggcattggaaaagatttcaaagagaatcccaacctcagagataactggaccgatgcagaaggctattatcgtgtgaacataggtgaagtcctagataaacgttacaatgtgtatggctacactgggcaaggtgtattcagtaatgttgtacgagccagagataatgcaagagccaaccaagaagtggctgtaaagatcatcagaaacaatgagctcatgcaaaagactggtttaaaagaattagagttcttgaaaaagcttaatgatgctgatcctgatgacaaatttcattgtctgagactcttcaggcacttctatcacaagcagcatctttgtctggtattcgagcctctcagcatgaacttacgagaggtgttaaaaaaatatggtaaagatgttggtcttcatattaaagctgtaagatcctatagtcagcagttgttcctggcattgaaactccttaaaagatgcaatatcctacatgcagatatcaagccagacaatatcctggttaatgaatccaaaactattttaaagctttgcgattttgggtcggcttcacatgttgcggataatgacataacaccttatcttgtcagtagattttatcgtgctcctgaaatcattataggtaaaagctatgactatggtatagatatgtggtctgtaggttgcaccttatacgaactctatactggaaaaattttattccctggcaaaaccaataaccatatgctgaagcttgcaatggatctcaaaggaaagatgccaaataagatgattcgaaaaggtgtgttcaaagatcagcattttgatcaaaatctcaacttcatgtacatagaagttgataaagtaacagagagggagaaagttactgttatgagcaccattaatccaactaaggacctgttggctgacttgattgggtgccagagacttcctgaagaccaacgtaagaaagtacaccagctaaaggacttgttggaccagattctgatgttggacccagctaaacgaattagcatcaaccaggccctacagcacgccttcatccaggaaaaaatttaaacaagatgaagaaactccaagggtttgagtaaatacaaagatgaagaaatttcacagcagtttcattaatgtatataaacttataaatatttctccagcaaatttgaggaagca

SEQ ID NO: 286 - protein, 496 aa, Homo sapiens
MKVEQESSSDDNLEDFDVEEEDEEALIEQRRIQRQAIVQKYKYLAEDSNMSVPSEPSSPQSSTRTRSPSPDDILERVAADVKEYERENVDTFEASVKAKHNLMTVEQNNGSSQKKLLAPDMFTESDDMFAAYFDSARLRAAGIGKDFKENPNLRDNWTDAEGYYRVNIGEVLDKRYNVYGYTGQGVFSNVVRARDNARANQEVAVKIIRNNELMQKTGLKELEFLKKLNDADPDDKFHCLRLFRHFYHKQHLCLVFEPLSMNLREVLKKYGKDVGLHIKAVRSYSQQLFLALKLLKRCNILHADIKPDNILVNESKTILKLCDFGSASHVADNDITPYLVSRFYRAPEIIIGKSYDYGIDMWSVGCTLYELYTGKILFPGKTNNHMLKLAMDLKGKMPNKMIRKGVFKDQHFDQNLNFMYIEVDKVTEREKVTVMSTINPTKDLLADLIGCQRLPEDQRKKVHQLKDLLDQILMLDPAKRISINQALQHAFIQEKI

SEQ ID NO: 287 - DNA, 2655 bp, Homo sapiens
  CDS (24)..(1565)
cgggtttgtcagagcaccataacatggtgtgggaagtgaagacaaatcagatgcctaatgcagtacagaaactcctgttggtgatggacaagagagcctcaggaatgaatgactcattggagttgctgcagtgtaatgagaatttgccatcttcacctggatataactcctgtgatgaacacatggagcttgatgaccttcctgaacttcaggcagttcaaagtgatcctacccaatctggcatgtaccagctgagttcagatgtttcacatcaagaatacccaagatcatcttggaaccaaaatacctcagacataccagaaactacttaccgtgaaaatgaggtggactggctaacagaattggcaaatatcgcgaccagtccacaaagtccactgatgcagtgctcattttacaatagatcatctcctgtacacatcatagccactagcaaaagtttacattcctatgcacgccctccaccagtgtcctcttcttcgaagagtgaaccagccttccctcatcaccattggaaggaggaaacaccagtaagacacgaaagggcaaatagtgagtcagaatctggcattttctgcatgtcctccctgtcagatgatgatgatttgggatggtgcaattcctggccttcaactgtctggcactgttttttgaaaggcacacgactgtgctttcataagggaagcaataaggaatggcaagatgttgaagattttgctagagctgaaggctgtgataatgaggaagatcttcaaatgggcattcacaagggctatggttctgatggtctaaagttgttatcacatgaagaaagtgtatcatttggcgagtctgtactgaagttgacttttgatcctggtacagtagaagatggtttacttaccgtagagtgtaagctggaccaccctttctatgttaaaaataaaggttggtcatcattttatccaagcttgactgtggtacagcatggcattccatgttgtgaagttcatattggcgatgtatgtctacctcctggacaccccgatgccattaattttgatgattcaggtgtttttgatacatttaaaagctatgacttcacacctatggattcttctgcagtttatgtgttaagtagtatggctcgccagcgtcgtgcatctttgtcttgtggaggacctggtggtcaagactttgcaagatctggattcagtaaaaactgtggctcacctggatcatcacagctctcttccaattctttgtatgctaaagctgtcaaaaaccacagctcagggactgtgagtgccacttctcctaataagtgcaaaagaccaatgaatgccttcatgctttttgccaaaaaatacagagttgaatatactcagatgtatccagggaaagataacagagccataagtgtgatccttggtgacaggtggaagaaaatgaagaatgaagagagaagaatgtacacattagaagcaaaggctttggctgaagaacagaaacgtttaaatcctgactgttggaagaggaaaagaaccaattcagtatgtttcaataaatagtgtttaaaattatcttgccttatccgtgcaggtgtactggcatgttggagcagttgttacaacctttaagaggttgtgttgatgctgtctctagcatttttatacttcaaaacctaataatgttatcacatcatcatataaagactgcctttcctcaagggtcatttactctcatagcatggcaagtcgaaatctcaggcaaacttcaaaagaatgtttgttctaaacattgagttggaaaaataattttggaatgcagtgtttctagttgggttgaaagataagcattattaatccattaatatcacagtagaaaatttctctaataattttgggattgtctcaacagctttttttccttaattggtgagggaccaataaggctggaggtgttggggtatgttagctgtcattcatggggacttgtgccattggcacagaatttctagattgaaaaatttcaaggaggagaagaaataggcccaggaatggtggcaaacaagtctatatgataagctatcttggatagacttgtttcttataacttttccattactaaactagcatcttttaggttcagcgtttttagattaattgcaaaaaaattacatgtgatatagtggggtcaatttgaagtatcattgaaagatgaagggaagatatcaatatttttatagtaggagggctggccaaagatgttttaaattcattgtgtacatgtgcctgtttcttagtaaaatgcaggtcatatctgtttaaatttttcacaatttctttaaaaatagtggtcagtcagtagtcagatgagagggtggctgaactgaattttggcagttcttggttaatttagaatttcatgtgttcggacttttcctgtatcccttttctgttcatcctagtcaatgtcttatcattgcatacattttctggatgcttgagccatcagatatcagctagctttttaaaatcacctttaagaaagcagtattttctaatagtaaatttataaacatcttatacatcttagctttcatatataggattactatgtattgatttgtaaacattcactgagtttaattttagt

SEQ ID NO: 288 - protein, 514 aa, Homo sapiens
MVWEVKTNQMPNAVQKLLLVMDKRASGMNDSLELLQCNENLPSSPGYNSCDEHMELDDLPELQAVQSDPTQSGMYQLSSDVSHQEYPRSSWNQNTSDIPETTYRENEVDWLTELANIATSPQSPLMQCSFYNRSSPVHIIATSKSLHSYARPPPVSSSSKSEPAFPHHHWKEETPVRHERANSESESGIFCMSSLSDDDDLGWCNSWPSTVWHCFLKGTRLCFHKGSNKEWQDVEDFARAEGCDNEEDLQMGIHKGYGSDGLKLLSHEESVSFGESVLKLTFDPGTVEDGLLTVECKLDHPFYVKNKGWSSFYPSLTVVQHGIPCCEVHIGDVCLPPGHPDAINFDDSGVFDTFKSYDFTPMDSSAVYVLSSMARQRRASLSCGGPGGQDFARSGFSKNCGSPGSSQLSSNSLYAKAVKNHSSGTVSATSPNKCKRPMNAFMLFAKKYRVEYTQMYPGKDNRAISVILGDRWKKMKNEERRMYTLEAKALAEEQKRLNPDCWKRKRTNSVCFNK

SEQ ID NO: 289 - DNA, 1500 bp, Homo sapiens
  CDS (103)..(633)
gaattccaaacagcctctaccttgcgagccgtcttccccaggcctgcgtccgagtctccgccgctgcgggcccgctccgacgcggaagatctgactgcagccatgagcagcaatgagtgcttcaagtgtggacgatctggccactgggcccgggaatgtcctactggtggaggccgtggtcgtggaatgagaagccgtggcagaggtggttttacctcggatagaggtttccagtttgtttcctcgtctcttccagatatttgttatcgctgtggtgagtctggtcatcttgccaaggattgtgatcttcaggaggatgcctgctataactgcggtagaggtggccacattgccaaggactgcaaggagcccaagagagagcgagagcaatgctgctacaactgtggcaaaccaggccatctggctcgtgactgcgaccatgcagatgagcagaaatgctattcttgtggagaattcggacacattcaaaaagactgcaccaaagtgaagtgctataggtgtggtgaaactggtcatgtagccatcaactgcagcaagacaagtgaagtcaactgttaccgctgtggcgagtcagggcaccttgcacgggaatgcacaattgaggctacagcctaattattttcctttgtcgcccctcctttttctgattgatggttgtattattttctctgaatcctcttcactggccaaaggttggcagatagaggcaactcccaggccagtgagctttacttgccgtgtaaaaggaggaaaggggtggaaaaaaaccgactttctgcatttaactacaaaaaaagtttatgtttagtttggtagaggtgttatgtataatgctttgttaaagaaccccctttccgtgccactggtgaatagggattgatgaatgggaagagttgagtcagaccagtaagcccgtcctgggttccttgaacatgttcccatgtaggaggtaaaaccaattctggaagtgtctatgaacttccataaataactttaattttagtataatgatggtcttggattgtctgacctcagtagctattaaataacatcaagtaacatctgtatcaggccctacatagaacatacagttgagtgggagtaaacaaaaagataaacatgcgtgttaatggctgttcgagagaaatcggaataaaagcctaaacaggaacaacttcatcacagtgttgatgttggacacatagatggtgatggcaaaggtttagaacacattattttcaaagactaaatctaaaacccagagtaaacatcaatgctcagagttagcataatttggagctattcaggaattgcagagaaatgcattttcacagaaatcaagatgttatttttgtatactatatcacttagacaactgtgtttcatttgctgtaatcagtttttaaaagtcagatggaaagagcaactgaagtcctagaaaatagaaatgtaattttaaactattccaataaagctgga

SEQ ID NO: 290 - protein, 177 aa, Homo sapiens
MSSNECFKCGRSGHWARECPTGGGRGRGMRSRGRGGFTSDRGFQFVSSSLPDICYRCGESGHLAKDCDLQEDACYNCGRGGHIAKDCKEPKREREQCCYNCGKPGHLARDCDHADEQKCYSCGEFGHIQKDCTKVKCYRCGETGHVAINCSKTSEVNCYRCGESGHLARECTIEATA

SEQ ID NO: 291 - DNA, 459 bp, Homo sapiens
  CDS (16)..(456)
cgccatccctgacccatggcgctgaagaggattcagaaagaattgagtgatctacagcgcgatccacctgctcactgttcagctggacctgtgggagatgacttgttccactggcaagccactattatggggcctcctgatagcgcatatcaaggtggagtcttctttctcactgtacattttccgacagattatccttttaaaccaccaaagattgctttcacaacaaaaatttaccatccaaacataaacagtaatggaagtatttgtctcgatattctgaggtcacaatggtcaccagctctgactgtatcaaaagttttattgtccatatgttctctactttgtgatcctaatccagatgaccccttagtaccagatattgcacaaatctataaatcagacaaagaaaaatacaacagacatgcaagagaatggactcagaaatatgcaatgtaa

SEQ ID NO: 292 - protein, 147 aa, Homo sapiens
MALKRIQKELSDLQRDPPAHCSAGPVGDDLFHWQATIMGPPDSAYQGGVFFLTVHFPTDYPFKPPKIAFTTKIYHPNINSNGSICLDILRSQWSPALTVSKVLLSICSLLCDPNPDDPLVPDIAQIYKSDKEKYNRHAREWTQKYAM

SEQ ID NO: 293 - DNA, 724 bp, Homo sapiens
  CDS (46)..(486)
gagcatacaccgagagagtgaggagccagacgacaagcacacactatggcgctgaaacggattaataaggaacttagtgatttggcccgtgaccctccagcacaatgttctgcaggtccagttggggatgatatgtttcattggcaagccacaattatgggacctaatgacagcccatatcaaggcggtgtattctttttgacaattcattttcctacagactaccccttcaaaccacctaaggttgcatttacaacaagaatttatcatccaaatattaacagtaatggcagcatttgtctcgatattctaagatcacagtggtcgcctgctttaacaatttctaaagttcttttatccatttgttcactgctatgtgatccaaacccagatgaccccctagtgccagagattgcacggatctataaaacagacagagataagtacaacagaatatctcgggaatggactcagaagtatgccatgtgatgctaccttaaagtcagaataacctgcattatagctggaataaactttaaattactgttccttttttgattttcttatccggctgctcccctgatcagacctcatcttttttaattttattttttgtttacctccctccattcattcacatgctcatctgagaagacttaagttcttccagctttgacaataactgcttttagaaactgtaaagtagttacaagagaacagttgg

SEQ ID NO: 294 - protein, 147 aa, Homo sapiens
MALKRINKELSDLARDPPAQCSAGPVGDDMFHWQATIMGPNDSPYQGGVFFLTIHFPTDYPFKPPKVAFTTRIYHPNINSNGSICLDILRSQWSPALTISKVLLSICSLLCDPNPDDPLVPEIARIYKTDRDKYNRISREWTQKYAM

SEQ ID NO: 295 - DNA, 1203 bp, Homo sapiens
  CDS (64)..(519)
actcgtgcgtgaggcgagaggagccggagacgagaccagaggccgaactcgggttctgacaagatggccgggctgccccgcaggatcatcaaggaaacccagcgtttgctggcagaaccagttcctggcatcaaagccgaaccagatgagagcaacgcccgttattttcatgtggtcattgctggccctcaggattccccctttgagggagggacttttaaacttgaactattccttccagaagaatacccaatggcagcccctaaagtacgtttcatgaccaaaatttatcatcctaatgtagacaagttgggaagaatatgtttagatattttgaaagataagtggtccccagcactgcagatccgcacagttctgctatcgatccaggccttgttaagtgctcccaatccagatgatccattagcaaatgatgtagcggagcagtggaagaccaacgaagcccaagccatagaaacagctagagcatggactaggctatatgccatgaataatatttaaattgatacgatcatcaagtgtgcatcacttctcctgttctgccaagacttcctcctctttgtttgcatttaatggacacagtcttagaaacattacagaataaaaaagcccagacatcttcagtcctttggtgattaaatgcacattagcaaatctatgtcttgtcctgattcactgtcataaagcatgagcagaggctagaagtatcatctggattgttgtgaaacgtttaaaagcagtggcccctccctgcttttattcatttcccccatcctggtttaagtataaagcactgtgaatgaaggtagttgtcaggttagctgcaggggtgtgggtgtttttattttattttattttattttatttttgaggggggaggtagtttaattttatgggctcctttcccccttttttggtgatctaattgcattggttaaaagcagctaaccaggtctttagaatatgctctagccaagtctaactttatttagacgctgtagatggacaagcttgattgttggaaccaaaatgggaacattaaacaaacatcacagccctcactaataacattgctgtcaagtgtagattccccccttcaaaaaaagcttgtgaccattttgtatggcttgtctggaaacttctgtaaatcttatgttttagtaaaatattttttgttattct

SEQ ID NO: 296 - protein, 152 aa, Homo sapiens
MAGLPRRIIKETQRLLAEPVPGIKAEPDESNARYFHVVIAGPQDSPFEGGTFKLELFLPEEYPMAAPKVRFMTKIYHPNVDKLGRICLDILKDKWSPALQIRTVLLSIQALLSAPNPDDPLANDVAEQWKTNEAQAIETARAWTRLYAMNNI

SEQ ID NO: 297 - DNA, 827 bp, Homo sapiens
  CDS (32)..(808)
gggcggaaggggtgggtagggccgggcgataatggcggcgtcgaggctggagctaaacctggtgcggctgctatcccgctgcgaggcgatggcagcggagaaacgggacccggacgagtggcgcctggagaagtacgtgggagccctagaggacatgttgcaggccctgaaggtccacgcgagcaaaccggcctctgaggtgatcaatgaatattcctggaaggtggattttctgaaggggatgctgcaagccgagaagctgacctcctcctcagagaaagcactggccaaccagttcctggcccctggccgtgtgccaaccacagccagagagcgagtgcccgccacaaagacggtgcatctgcagtcacgggcgcggtacaccagcgagatgcggagtgagctactaggcacggactctgcagagcctgagatggacgtaaggaagagaactggagtggcagggtcccagccagtgagtgagaagcagtcggcagctgagctagacctcgtcctgcagcgacatcagaacctccaggaaaagctggcggaagagatgctaggactggcccggagcctcaagaccaataccctggccgcccagagtgtcatcaagaaggacaaccagaccctgtcacactcactgaaaatggcggaccagaacctggagaaactgaagacggagtcagagcgtctggagcagcacacgcagaagtcagtcaactggctgctctgggccatgctcattatcgtctgcttcatcttcattagcatgatcctcttcattcgaatcatgcctaaactcaaataaagacccccgcccacct

SEQ ID NO: 298 - protein, 259 aa, Homo sapiens
MAASRLELNLVRLLSRCEAMAAEKRDPDEWRLEKYVGALEDMLQALKVHASKPASEVINEYSWKVDFLKGMLQAEKLTSSSEKALANQFLAPGRVPTTARERVPATKTVHLQSRARYTSEMRSELLGTDSAEPEMDVRKRTGVAGSQPVSEKQSAAELDLVLQRHQNLQEKLAEEMLGLARSLKTNTLAAQSVIKKDNQTLSHSLKMADQNLEKLKTESERLEQHTQKSVNWLLWAMLIIVCFIFISMILFIRIMPKLK

SEQ ID NO: 299 - DNA, 2429 bp, Homo sapiens
  CDS (6)..(2330)
ctgcaatggcggctctagactccctgtcgctcttcactagcctcggcctgagcgagcagaaggcccgcgagacgctcaagaactcggctctgagcgcgcagctgcgcgaggccgctactcaggctcagcagaccctgggttccaccattgacaaagctaccgggatcctgttatatggcttggcctcccgactcagggatacccggcgtctctccttccttgtaagctacatagccagtaagaagatccacactgagccccagctaagcgctgcccttgagtatgtgcggagtcaccccttggaccccatcgacactgtggacttcgagcgggaatgtggcgtgggtgtcattgtgaccccagagcagattgaggaggctgtggaggctgctattaacaggcaccggccccagctcctggtggaacgttaccatttcaacatggggctgctgatgggagaggctcgggctgtgctgaagtgggcagatggcaaaatgatcaagaatgaagtggacatgcaggtcctccaccttctgggccccaagttggaggctgatctggagaagaagttcaaggtggcaaaagctcggctagaagaaacagaccggaggacggcaaaggatgtggtggagaatggcgagactgctgaccagaccctgtctctgatggagcagctccggggggaggcccttaagttccacaagcctggtgagaactacaagaccccaggctatgtggtcactccacacaccatgaatctactaaagcagcacctggagattactggtgggcaggtacgtacccggttcccgccagaacccaatggaatcctgcatattggacatgccaaagccatcaatttcaactttggctatgccaaggccaacaatggcatctgttttctgcgttttgatgacaccaaccctgagaaggaggaagcaaagttcttcacggccatctgtgacatggtagcctggctaggctacacaccttacaaagtcacatatgcgtctgactattttgaccagctatatgcgtgggctgtggagctcatccgcaggggtctggcttatgtgtgccaccagcgaggagaggagctcaaaggccataatactctgccttcaccctggagagaccgtcccatggaggagtcactgctgctctttgaggcaatgcgcaagggcaagttttcagagggcgaggccacactacggatgaagctggtgatggaggatggcaagatggaccctgtagcctatcgagtcaagtatacaccacaccaccgcacaggggacaaatggtgcatctatcccacctacgactacacacactgcctctgtgactccatcgagcacatcactcactcactctgcaccaaggaattccaggcccgacgctcttcctacttctggctttgcaatgcactggacgtctattgccctgtgcagtgggagtatggccgcctcaacctgcactatgctgttgtctctaagaggaagatcctccagcttgtagcaactggtgctgtgcgggactgggatgacccacggctctttacactcacggccctgcgacggcggggcttcccacctgaggccatcaacaacttctgtgcccgggtgggagtgactgtggcacaaaccacaatggagccacatcttctagaagcctgtgtgcgtgatgtgctgaatgacacagccccacgagccatggctgtgctggagtcactacgggtcatcatcaccaactttcctgctgccaagtccttggacatccaggtgcccaacttcccagctgatgagaccaaaggcttccatcaggttccctttgcacccattgtcttcattgagaggactgacttcaaggaggagccagagccaggatttaagcgcctggcttggggccagcctgtgggcctgaggcatacaggctacgtcattgagctgcagcatgttgtcaagggccccagtggttgtgtagagagtctggaggtgacctgcagacgggcagatgctggagagaagccaaaggcctttattcactgggtgtcacagcctttgatgtgtgaggttcgcctctatgagcgactattccagcacaagaaccctgaagatcctactgaggtgcctggtggatttttaagtgacctgaacctggcatcactacacgtggtggatgcagcattagtggactgctctgtggccctggcaaaacccttcgacaagttccagtttgagcgtcttggatatttctccgtggatccagacagccatcagggaaagcttgtctttaaccgaactgtcacactgaaggaagacccaggaaaggtgtgagctggaagcactgaacctacctcatcctcctggagggtgtggctaccctcgccaccccaaattccatgtcaataaagaacagctaaattctcctag

SEQ ID NO: 300 - protein, 775 aa, Homo sapiens
MAALDSLSLFTSLGLSEQKARETLKNSALSAQLREAATQAQQTLGSTIDKATGILLYGLASRLRDTRRLSFLVSYIASKKIHTEPQLSAALEYVRSHPLDPIDTVDFERECGVGVIVTPEQIEEAVEAAINRHRPQLLVERYHFNMGLLMGEARAVLKWADGKMIKNEVDMQVLHLLGPKLEADLEKKFKVAKARLEETDRRTAKDVVENGETADQTLSLMEQLRGEALKFHKPGENYKTPGYVVTPHTMNLLKQHLEITGGQVRTRFPPEPNGILHIGHAKAINFNFGYAKANNGICFLRFDDTNPEKEEAKFFTAICDMVAWLGYTPYKVTYASDYFDQLYAWAVELIRRGLAYVCHQRGEELKGHNTLPSPWRDRPMEESLLLFEAMRKGKFSEGEATLRMKLVMEDGKMDPVAYRVKYTPHHRTGDKWCIYPTYDYTHCLCDSIEHITHSLCTKEFQARRSSYFWLCNALDVYCPVQWEYGRLNLHYAVVSKRKILQLVATGAVRDWDDPRLFTLTALRRRGFPPEAINNFCARVGVTVAQTTMEPHLLEACVRDVLNDTAPRAMAVLESLRVIITNFPAAKSLDIQVPNFPADETKGFHQVPFAPIVFIERTDFKEEPEPGFKRLAWGQPVGLRHTGYVIELQHVVKGPSGCVESLEVTCRRADAGEKPKAFIHWVSQPLMCEVRLYERLFQHKNPEDPTEVPGGFLSDLNLASLHVVDAALVDCSVALAKPFDKFQFERLGYFSVDPDSHQGKLVFNRTVTLKEDPGKV

SEQ ID NO: 301 - DNA, 2673 bp, Homo sapiens
  CDS (33)..(2348)
gttccggcgaggaggccgcgccagtgacagcgatggcggcggagtcggcgctccaagttgtggagaagctgcaggcgcgcctggccgcgaacccggaccctaagaagctattgaaatatttgaagaaactctccaccctgcctattacagtagacattcttgcggagactggggttgggaaaacagtaaatagcttgcgaaaacacgagcatgttggaagctttgccagggacctagtggcccagtggaagaagctggttcctgtggaacgaaatgctgagcctgatgaacaggactttgagaagagcaattcccgaaagcgccctcgggatgccctgcagaaggaggaggagatggagggggactaccaagaaacctggaaagccacggggagccgatcctatagccctgaccacaggcagaagaaacataggaaactctcggagctcgagagacctcacaaagtgtctcacggtcatgagaggagagatgagagaaagaggtgtcacagaatgtcaccaacttactcttcagaccctgagtcttctgattatggccatgttcaatcccctccatcttgtaccagtcctcatcagatgtacgtcgaccactacagatccctggaggaggaccaggagcccattgtttcacaccagaagcctgggaaaggccacagcaatgcctttcaggacagactcggggccagccaagaacgacacctgggtgaaccccatgggaaaggggttgtgagtcaaaacaaggagcacaaatcttcccacaaggacaaacgccccgtggatgccaagagtgatgagaaggcctctgtggtgagcagagagaaatcacacaaggccctctccaaagaggagaaccgaaggccaccctcaggggacaatgcaagggagaaaccgccctctagtggcgtaaagaaagagaaggacagagagggcagcagcctgaagaagaagtgtttgcctccctcagaggccgcttcagacaaccacctgaaaaagccaaagcacagagacccagagaaagccaaattggacaaaagcaagcaaggtctggacagctttgacacaggaaaaggagcaggagacctgttgcccaaggtaaaagagaagggttctaacaacctaaagactccagaagggaaagtcaaaactaatttggatagaaagtcactgggctccctccctaaagttgaggagacagatatggaggatgaattcgagcagccaaccatgtcttttgaatcctacctcagctatgaccagccccggaagaaaaagaaaaagattgtgaaaacttcagccacggcacttggagataaaggacttaaaaaaaatgactctaaaagcactggtaaaaacttggactcagttcagaaattacccaaggtgaacaaaaccaagtcagagaagccggctggagctgatttagccaagctgagaaaggtgcctgatgtgttgccagtgttgccagacctcccgttacccgcgatacaggccaattaccgtccactgccttccctcgagctgatatcctccttccagccaaagcgaaaagcgttctcttcaccccaggaagaagaagaagctggatttactgggcgcagaatgaattccaagatgcaggtgtattctggttccaagtgtgcctatctccctaaaatgatgaccttgcaccagcaatgcatccgagtacttaaaaacaacatcgattcaatctttgaagtgggaggagtcccatactctgttcttgaacccgttttggagaggtgtacacctgatcagctgtatcgcatagaggaatacaatcatgtattaattgaagaaacagatcaattatggaaagttcattgtcaccgagactttaaggaagaaagacccgaagagtatgagtcgtggcgagagatgtacctgcggcttcaggacgcccgagagcagcggctacgagtactaacaaagaatatccagttcgcacatgccaataagcccaaaggccgacaagcaaagatggcctttgtcaactctgtggccaagccacctcgtgacgtccggaggaggcaggaaaagtttggaacgggaggagcagctgtccctgagaaaatcaagatcaagccagccccgtaccccatgggaagcagccatgcttccgccagtagcatcagctttaaccccagccctgaggagccggcctatgatggcccaagcaccagcagtgcccacttggcaccagtggtcagcagcactgtttcctatgatcctaggaaacccactgtgaagaaaattgccccaatgatggccaagacaattaaagctttcaagaacagattctcccgacgataaactgaggacttgccttggaaatggaatctggggaggcaggaatacaaggacagtgggggttggggaatggaattctacaggagactggagtcttgctttgtggatccttttggtctccgagtctgcagtctgcaggtgctgcccctgggaacctgcgtgccacagccccgcctccctgcctggagcacactttagaattctgaagatgtgaagcctctgtctcactgaggattttaaaggtcaattatacttttgttgttcattagcatctttgtaaactataagacgtagttttaattaataaatattgcccccagatgtt

SEQ ID NO: 302 - protein, 772 aa, Homo sapiens
MAAESALQVVEKLQARLAANPDPKKLLKYLKKLSTLPITVDILAETGVGKTVNSLRKHEHVGSFARDLVAQWKKLVPVERNAEPDEQDFEKSNSRKRPRDALQKEEEMEGDYQETWKATGSRSYSPDHRQKKHRKLSELERPHKVSHGHERRDERKRCHRMSPTYSSDPESSDYGHVQSPPSCTSPHQMYVDHYRSLEEDQEPIVSHQKPGKGHSNAFQDRLGASQERHLGEPHGKGVVSQNKEHKSSHKDKRPVDAKSDEKASVVSREKSHKALSKEENRRPPSGDNAREKPPSSGVKKEKDREGSSLKKKCLPPSEAASDNHLKKPKHRDPEKAKLDKSKQGLDSFDTGKGAGDLLPKVKEKGSNNLKTPEGKVKTNLDRKSLGSLPKVEETDMEDEFEQPTMSFESYLSYDQPRKKKKKIVKTSATALGDKGLKKNDSKSTGKNLDSVQKLPKVNKTKSEKPAGADLAKLRKVPDVLPVLPDLPLPAIQANYRPLPSLELISSFQPKRKAFSSPQEEEEAGFTGRRMNSKMQVYSGSKCAYLPKMMTLHQQCIRVLKNNIDSIFEVGGVPYSVLEPVLERCTPDQLYRIEEYNHVLIEETDQLWKVHCHRDFKEERPEEYESWREMYLRLQDAREQRLRVLTKNIQFAHANKPKGRQAKMAFVNSVAKPPRDVRRRQEKFGTGGAAVPEKIKIKPAPYPMGSSHASASSISFNPSPEEPAYDGPSTSSAHLAPVVSSTVSYDPRKPTVKKIAPMMAKTIKAFKNRFSRR

SEQ ID NO: 303 - DNA, 5024 bp, Homo sapiens
  CDS (318)..(2327)
cgggattcggctggctctgccacaccaccgcgcgcccccgctccgcccgcccctccgggcgcgtcttttccgggctcgcgctgagtcccgcctccgccggctgtccgggtgcgcgcgcgccgctgcggctttttctctggcctccgccgcgcgctcctcctcgtcccagcgctagcgggcacgcggttcctttttgcgagctttccgagtgccaggcgccggccggctgcgaagacgcggtgggccgcccctccgattgaaatcacagaagatattcgtgttcttcttaagagaaaaagaggacatttaaaaacgctatggcaaagagaataaaagctaagcccacttcagacaaacctggaagtccatatcgctctgtcacacacttcgactcactagctgtaatagacatccctggagcagatactctggataaattatttgaccatgctgtatccaagtttgggaagaaggacagccttgggaccagggaaatcctaagtgaagaaaatgaaatgcagccaaatggaaaagtttttaagaagttaattcttgggaattataaatggatgaactatcttgaagtgaatcgcagagtgaataactttggtagtggactcactgcactgggactaaaaccaaagaacaccattgccatcttctgtgagaccagggccgaatggatgattgcagcacagacctgctttaagtacaactttcctcttgtgactttatatgccacacttggcaaagaagcagtagttcatgggctaaatgaatctgaggcttcctatctgattaccagtgttgaacttctggaaagtaaacttaagactgcattgttagatatcagttgtgttaaacatatcatttatgtggacaataaggctatcaataaagcagagtaccctgaaggatttgagattcacagcatgcaatcagtagaagagttgggatctaacccagaaaacttgggcattcctccaagtagaccaacgccttcagacatggccattgttatgtatactagtggttctactggccgacctaagggagtgatgatgcatcatagcaatttgatagctggaatgacaggccagtgtgaaagaatacctggactgggaccgaaggacacatatattggctacttgcctttggctcatgtgctagaactgacagcagagatatcttgctttacctatggctgcaggattggatattcttctccgcttacactctctgaccagtccagcaaaattaaaaaaggaagcaaaggagactgtactgtactgaagcccacacttatggctgctgttccggaaatcatggatagaatttataagaatgttatgagcaaagtccaagagatgaattatattcagaaaactctgttcaagatagggtatgattacaaattggaacagatcaaaaagggatatgatgcacctctttgcaatctgttactgtttaaaaaggtcaaggccctgctgggagggaatgtccgcatgatgctgtctggaggggccccgctatctcctcagacacaccgattcatgaatgtctgcttctgctgcccaattggccagggttatggactgacagaatcatgtggtgctgggacagttactgaagtaactgactatactactggcagagttggagcacctcttatttgctgtgaaattaagctaaaagactggcaagaaggcggttatacaattaatgacaagccaaaccccagaggtgaaatcgtaattggtggacagaacatctccatgggatattttaaaaatgaagagaaaacagcagaagattattctgtggatgaaaatggacaaaggtggttttgcactggtgatattggagaattccatcccgatggatgtttacagattatagatcgtaagaaagatctagtgaagttacaagcaggagagtatgtatctcttgggaaagtagaagctgcactgaagaattgtccacttattgacaacatctgtgcttttgccaaaagtgatcagtcctatgtgatcagttttgtggttcctaaccagaaaaggttgacacttttggcacaacagaaaggggtagaaggaacttgggttgatatctgcaataatcctgctatggaagctgaaatactgaaagaaattcgagaagctgcaaatgccatgaaattggagcgatttgaaattccaatcaaggttcgattaagcccagagccatggacccctgaaactggtttggtaactgatgctttcaaactgaaaaggaaggagctgaggaaccattacctcaaagacattgaacgaatgtatgggggcaaataaaatgttgttgtcttattgacagttgtgcaggaggtagcctggtggttttcaacctctagaattttaagcctttgttgaactgttagaatgtaaggtatatcattctaaagatagagtaaaaagaaaacaaaaccaaaagttattaaaattgttgtccggtttactttaacttagttttgcatagttctagtgcagctgaaattgaaaagttatttccctttagctgtgttattatagagcagaaattctgtttttaaaaattagcctaagatatacttgtttttgtaaagaaaaatatttaatgttgaacaaaataaattggagttggagtagaatgtagtttgaggaaatttgcagcttccaatgcctcttgtcttcctatttcagaagtttaaatattaagcatgacagaaaatatgtattaacactactcaaagcaaaagtgctgcagggctttaaaattctcttccaaccatttatcttgaaggaaaaattcaatagtaatataatacacaaaatcaaataataccttagaaggtattaagattataattgttgcataggttagatatagagtcattgtaatgttgtgaataattacagtgcctaaaataagaatagaacaacatatacaacaccaaaaaatatctagtaatatatttaaagggaaattgagctgctttttttgaaactttgagatctaaaaataactgtaattatttgaatgactaagaggaaagtacattttttgaaatgctgaaaattgcctttctgtgtttattcaaactgaaaagctgagaccaagagcaaggaaggtaaaaagttaacaggcaaacattttctcttagaaaaggtgataaaatcataagtatttggaattagaacccttgcacagcactgaacctgggaaagagatttaaactctgaatttatctttgataacagggattgattttaaaatgtacatgtattaaattacatttgtaatttaaggtctgtttgctgttgctgattttattcttgatcagtagtttgcatttcagaaagcctttcattttgctttaagtttagcaaagcggggttataatgaatgacttccccaatatcttgcttgaacttacagtgattaacttggatgagttttgggaagttaaagggaagaaaacactgttatcattttttcctgtttgggaagagcttagaaactggaaatactagatttgggagaagggcagagttacttgataagggacttgatgtttgtgcagtaacttgggagtgtggtttctttttgaatctttaattaaaacctgggattatatatccctgataaatattcacacttgaaccatagttactgtaaaatgcaaaaaatcttaatactgttattctttgcactttttcttaatcattttttatatatatgcatatatatatgtgtgtgtgtgtgttgcttatgttgttttgtacagatgtgggccaccattgcaacaaaatacattctttttgctctaaaatatttatgaagaaaatacttaaatgttatgtatatggtggtaataagggaaaaatcaagtattataaacaagaatgaaggtttttgtaaagatttctgttcagcgttttgcaaggtaaaattttaggcaagttttccctgaagttatgtgtatgtgagtattctcattcttcccaacttgcctttgaagagtgaaataccattattatcaagtagactactgttcagcttttattccttccctggttgtttatcccttaggaatgagtttcttagactttcccaatatgtgattttttttcccatttagaatggtgattttaaatgtgtgagtgcatgtactatcttatctcagatatttgcacccccaatctgcccccaactcccaaaagctagaacactgccaactgatctgttataggtcctttagaaacacataattaacacttaaggttgggtgctgctaattctttgcaaaaatccaaatattgttaagggaccagggagatgccactaccccttgattttccatctaaaaatatacatgtttatgtaaacaaatctttccatatccatagtgacttttcaagtatttaagcctaaagattttgatctcacatttttatacctgtttaaattgctcacagttattacatacacatcagccatcaactaaagttgtactttaaaaatttactacaatatgtacatttctaagtcaaacacttgtgacttttgctttaattccatgaatgttcctgcctccttgatatttgtatttattctttttttctctagagtagaggtataattgtgtgatatttcagaaatacagataaatgattcaaaaagtcacagttaaggagaatcatgtttctttgatcatgaataactgattagtaagtcttgcctatattttcctgatagcatatgacaaatgtttctaaggtaacaagatgagaacagataaagattgtgtggtgttttggatttggagagaaatattttaatttttaaatgcagttacaaattataatgtattcatatttgtactttctgttaaaatgcatgattgcagaattgtttagattttgtgtttattcttgatgaaaagctttgtttgttcttgtttttaagtttgcactcaaatcttaagaaataaatccacccatgttatc

SEQ ID NO: 304 - protein, 670 aa, Homo sapiens
MAKRIKAKPTSDKPGSPYRSVTHFDSLAVIDIPGADTLDKLFDHAVSKFGKKDSLGTREILSEENEMQPNGKVFKKLILGNYKWMNYLEVNRRVNNFGSGLTALGLKPKNTIAIFCETRAEWMIAAQTCFKYNFPLVTLYATLGKEAVVHGLNESEASYLITSVELLESKLKTALLDISCVKHIIYVDNKAINKAEYPEGFEIHSMQSVEELGSNPENLGIPPSRPTPSDMAIVMYTSGSTGRPKGVMMHHSNLIAGMTGQCERIPGLGPKDTYIGYLPLAHVLELTAEISCFTYGCRIGYSSPLTLSDQSSKIKKGSKGDCTVLKPTLMAAVPEIMDRIYKNVMSKVQEMNYIQKTLFKIGYDYKLEQIKKGYDAPLCNLLLFKKVKALLGGNVRMMLSGGAPLSPQTHRFMNVCFCCPIGQGYGLTESCGAGTVTEVTDYTTGRVGAPLICCEIKLKDWQEGGYTINDKPNPRGEIVIGGQNISMGYFKNEEKTAEDYSVDENGQRWFCTGDIGEFHPDGCLQIIDRKKDLVKLQAGEYVSLGKVEAALKNCPLIDNICAFAKSDQSYVISFVVPNQKRLTLLAQQKGVEGTWVDICNNPAMEAEILKEIREAANAMKLERFEIPIKVRLSPEPWTPETGLVTDAFKLKRKELRNHYLKDIERMYGGK

SEQ ID NO: 305 - DNA, 5336 bp, Homo sapiens
  CDS (507)..(2639)
cgggattcggctggctctgccacaccaccgcgcgcccccgctccgcccgcccctccgggcgcgtcttttccgggctcgcgctgagtcccgcctccgccggctgtccgggtgcgcgcgcgccgctgcggctttttctctggcctccgccgcgcgctcctcctcgtcccagcgctagcgggcacgcggttcctttttgcgagctttccgagtgccaggcgccggccggctgcgaagacgcggtgggccgcccctccgattgaaatcacagaagatattcgtgttcttcttaagagaaaaagaggacattttagctttctcagttgaaggcgtactttattgtcggcttccaaagattactaacttttatctgtatcactaagattgaactgccttggctgtactgctattcttactgctgcttctattattgccttcttcagcacaataaggctttcaaaagccaaagaataacaagaaataagcaccattttagaagcctttccactatgaaacttaagctaaatgtgctcaccattattttgctgcctgtccacttgttaataacaatatacagtgcccttatatttattccatggtattttcttaccaatgccaagaagaaaaacgctatggcaaagagaataaaagctaagcccacttcagacaaacctggaagtccatatcgctctgtcacacacttcgactcactagctgtaatagacatccctggagcagatactctggataaattatttgaccatgctgtatccaagtttgggaagaaggacagccttgggaccagggaaatcctaagtgaagaaaatgaaatgcagccaaatggaaaagtttttaagaagttaattcttgggaattataaatggatgaactatcttgaagtgaatcgcagagtgaataactttggtagtggactcactgcactgggactaaaaccaaagaacaccattgccatcttctgtgagaccagggccgaatggatgattgcagcacagacctgctttaagtacaactttcctcttgtgactttatatgccacacttggcaaagaagcagtagttcatgggctaaatgaatctgaggcttcctatctgattaccagtgttgaacttctggaaagtaaacttaagactgcattgttagatatcagttgtgttaaacatatcatttatgtggacaataaggctatcaataaagcagagtaccctgaaggatttgagattcacagcatgcaatcagtagaagagttgggatctaacccagaaaacttgggcattcctccaagtagaccaacgccttcagacatggccattgttatgtatactagtggttctactggccgacctaagggagtgatgatgcatcatagcaatttgatagctggaatgacaggccagtgtgaaagaatacctggactgggaccgaaggacacatatattggctacttgcctttggctcatgtgctagaactgacagcagagatatcttgctttacctatggctgcaggattggatattcttctccgcttacactctctgaccagtccagcaaaattaaaaaaggaagcaaaggagactgtactgtactgaagcccacacttatggctgctgttccggaaatcatggatagaatttataagaatgttatgagcaaagtccaagagatgaattatattcagaaaactctgttcaagatagggtatgattacaaattggaacagatcaaaaagggatatgatgcacctctttgcaatctgttactgtttaaaaaggtcaaggccctgctgggagggaatgtccgcatgatgctgtctggaggggccccgctatctcctcagacacaccgattcatgaatgtctgcttctgctgcccaattggccagggttatggactgacagaatcatgtggtgctgggacagttactgaagtaactgactatactactggcagagttggagcacctcttatttgctgtgaaattaagctaaaagactggcaagaaggcggttatacaattaatgacaagccaaaccccagaggtgaaatcgtaattggtggacagaacatctccatgggatattttaaaaatgaagagaaaacagcagaagattattctgtggatgaaaatggacaaaggtggttttgcactggtgatattggagaattccatcccgatggatgtttacagattatagatcgtaagaaagatctagtgaagttacaagcaggagagtatgtatctcttgggaaagtagaagctgcactgaagaattgtccacttattgacaacatctgtgcttttgccaaaagtgatcagtcctatgtgatcagttttgtggttcctaaccagaaaaggttgacacttttggcacaacagaaaggggtagaaggaacttgggttgatatctgcaataatcctgctatggaagctgaaatactgaaagaaattcgagaagctgcaaatgccatgaaattggagcgatttgaaattccaatcaaggttcgattaagcccagagccatggacccctgaaactggtttggtaactgatgctttcaaactgaaaaggaaggagctgaggaaccattacctcaaagacattgaacgaatgtatgggggcaaataaaatgttgttgtcttattgacagttgtgcaggaggtagcctggtggttttcaacctctagaattttaagcctttgttgaactgttagaatgtaaggtatatcattctaaagatagagtaaaaagaaaacaaaaccaaaagttattaaaattgttgtccggtttactttaacttagttttgcatagttctagtgcagctgaaattgaaaagttatttccctttagctgtgttattatagagcagaaattctgtttttaaaaattagcctaagatatacttgtttttgtaaagaaaaatatttaatgttgaacaaaataaattggagttggagtagaatgtagtttgaggaaatttgcagcttccaatgcctcttgtcttcctatttcagaagtttaaatattaagcatgacagaaaatatgtattaacactactcaaagcaaaagtgctgcagggctttaaaattctcttccaaccatttatcttgaaggaaaaattcaatagtaatataatacacaaaatcaaataataccttagaaggtattaagattataattgttgcataggttagatatagagtcattgtaatgttgtgaataattacagtgcctaaaataagaatagaacaacatatacaacaccaaaaaatatctagtaatatatttaaagggaaattgagctgctttttttgaaactttgagatctaaaaataactgtaattatttgaatgactaagaggaaagtacattttttgaaatgctgaaaattgcctttctgtgtttattcaaactgaaaagctgagaccaagagcaaggaaggtaaaaagttaacaggcaaacattttctcttagaaaaggtgataaaatcataagtatttggaattagaacccttgcacagcactgaacctgggaaagagatttaaactctgaatttatctttgataacagggattgattttaaaatgtacatgtattaaattacatttgtaatttaaggtctgtttgctgttgctgattttattcttgatcagtagtttgcatttcagaaagcctttcattttgctttaagtttagcaaagcggggttataatgaatgacttccccaatatcttgcttgaacttacagtgattaacttggatgagttttgggaagttaaagggaagaaaacactgttatcattttttcctgtttgggaagagcttagaaactggaaatactagatttgggagaagggcagagttacttgataagggacttgatgtttgtgcagtaacttgggagtgtggtttctttttgaatctttaattaaaacctgggattatatatccctgataaatattcacacttgaaccatagttactgtaaaatgcaaaaaatcttaatactgttattctttgcactttttcttaatcattttttatatatatgcatatatatatgtgtgtgtgtgtgttgcttatgttgttttgtacagatgtgggccaccattgcaacaaaatacattctttttgctctaaaatatttatgaagaaaatacttaaatgttatgtatatggtggtaataagggaaaaatcaagtattataaacaagaatgaaggtttttgtaaagatttctgttcagcgttttgcaaggtaaaattttaggcaagttttccctgaagttatgtgtatgtgagtattctcattcttcccaacttgcctttgaagagtgaaataccattattatcaagtagactactgttcagcttttattccttccctggttgtttatcccttaggaatgagtttcttagactttcccaatatgtgattttttttcccatttagaatggtgattttaaatgtgtgagtgcatgtactatcttatctcagatatttgcacccccaatctgcccccaactcccaaaagctagaacactgccaactgatctgttataggtcctttagaaacacataattaacacttaaggttgggtgctgctaattctttgcaaaaatccaaatattgttaagggaccagggagatgccactaccccttgattttccatctaaaaatatacatgtttatgtaaacaaatctttccatatccatagtgacttttcaagtatttaagcctaaagattttgatctcacatttttatacctgtttaaattgctcacagttattacatacacatcagccatcaactaaagttgtactttaaaaatttactacaatatgtacatttctaagtcaaacacttgtgacttttgctttaattccatgaatgttcctgcctccttgatatttgtatttattctttttttctctagagtagaggtataattgtgtgatatttcagaaatacagataaatgattcaaaaagtcacagttaaggagaatcatgtttctttgatcatgaataactgattagtaagtcttgcctatattttcctgatagcatatgacaaatgtttctaaggtaacaagatgagaacagataaagattgtgtggtgttttggatttggagagaaatattttaatttttaaatgcagttacaaattataatgtattcatatttgtactttctgttaaaatgcatgattgcagaattgtttagattttgtgtttattcttgatgaaaagctttgtttgttcttgtttttaagtttgcactcaaatcttaagaaataaatccacccatgttatc

SEQ ID NO: 306 - protein, 711 aa, Homo sapiens
MKLKLNVLTIILLPVHLLITIYSALIFIPWYFLTNAKKKNAMAKRIKAKPTSDKPGSPYRSVTHFDSLAVIDIPGADTLDKLFDHAVSKFGKKDSLGTREILSEENEMQPNGKVFKKLILGNYKWMNYLEVNRRVNNFGSGLTALGLKPKNTIAIFCETRAEWMIAAQTCFKYNFPLVTLYATLGKEAVVHGLNESEASYLITSVELLESKLKTALLDISCVKHIIYVDNKAINKAEYPEGFEIHSMQSVEELGSNPENLGIPPSRPTPSDMAIVMYTSGSTGRPKGVMMHHSNLIAGMTGQCERIPGLGPKDTYIGYLPLAHVLELTAEISCFTYGCRIGYSSPLTLSDQSSKIKKGSKGDCTVLKPTLMAAVPEIMDRIYKNVMSKVQEMNYIQKTLFKIGYDYKLEQIKKGYDAPLCNLLLFKKVKALLGGNVRMMLSGGAPLSPQTHRFMNVCFCCPIGQGYGLTESCGAGTVTEVTDYTTGRVGAPLICCEIKLKDWQEGGYTINDKPNPRGEIVIGGQNISMGYFKNEEKTAEDYSVDENGQRWFCTGDIGEFHPDGCLQIIDRKKDLVKLQAGEYVSLGKVEAALKNCPLIDNICAFAKSDQSYVISFVVPNQKRLTLLAQQKGVEGTWVDICNNPAMEAEILKEIREAANAMKLERFEIPIKVRLSPEPWTPETGLVTDAFKLKRKELRNHYLKDIERMYGGK

SEQ ID NO: 307 - DNA, 1949 bp, Homo sapiens
  CDS (190)..(1521)
gggggagggtcggagctctggtggagagagtgttgtctaaaacaagttccggaagggaggctgcccttcgcggtccgagaaccaccggcctccccagtttgagggctgttaccccgtgcgcgcttcgacgttgctgctgttggctctcctcgcccctcgttcccttgggaaccgcctgggaactccgccatgtcatccacttcgcccaacctccagaaagcgatagatctggctagcaaagcagcgcaagaagacaaggctgggaactacgaagaagcccttcagctctatcagcatgctgtgcagtattttcttcatgtcgttaaatatgaagcacaaggtgataaagccaagcaaagtatcagggcaaagtgtacagaatatcttgatagagcagaaaaactaaaggagtacctgaaaaataaagagaaaaaagcacagaagccagtgaaagaaggacagccgagtccagcagatgagaaggggaatgacagtgatggggaaggagaatctgatgatcctgaaaaaaggaaactacagaatcaacttcaaggtgccattgttatagaccgaccaaatgtgaaatggagtgacgttgctggacttgaaggagccaaagaagcactgaaagaggctgtgatactgcctattaaatttcctcatctttttacaggcaagagaacaccttggaggggaatcctattatttgggccgcctggaacaggaaagtcctacttagccaaagctgtagcaacagaagccaacaactcaacatttttttcaatatcttcctctgatcttgtttctaagtggctaggtgaaagtgaaaaactggttaagaatttattccaacttgccagagagaacaagccctccattatcttcattgatgaaattgattctctctgtggttcaagaagtgaaaatgaaagtgaagccgcacgtagaattaagacggagttcctagtgcaaatgcaaggggttggtgtagacaatgatggaattttggttctgggagctacaaatataccctgggttctggattctgccattaggcgaagatttgagaaacgaatttatattcccttgccggaaccccatgcccgagcagcaatgtttaaactgcacctagggaccactcagaacagtctcacggaagcagactttcgggaacttgggaggaaaacagatggttattcaggggcagatataggtatcattgtacgtgatgcccttatgcagcctgttaggaaagtacagtcagctactcattttaaaaaggttcgcggaccttcccgagctgatcctaaccatcttgtagatgatctgctaacaccttgctctccaggtgaccctggtgccattgaaatgacgtggatggatgtccctggagataaacttttggagccagttgtttccatgtcggatatgttgcggtcactatctaacacaaaacctacagtcaatgaacatgacttgttgaaattaaagaagtttacagaagattttggtcaagaaggctaagccaaagacaaggaagatgcttaccatatgtattctttctttcatagatatttttgtctatttggatcgcattaattgtttccagtaaaactcttttaccacagggaaatacacatctcacttcagagttccattaggttttatattgtacttttcctccattacttattaaatactcctattaacaaaaggtacaaaataacaggttatgaggaaatgagcgatatatgaacggcataaaaacagaaattacccagtaaaaaggatgtcagaaattgacatacaaatatttacaatttttatgaatggtggtctttgcaaagagcatttatattttcttttttttttactaaaatgatatatgggtttattttatattttcaaaaaaattgttaaacatcattcttatcaatgtaaaatttacg

SEQ ID NO: 308 - protein, 444 aa, Homo sapiens
MSSTSPNLQKAIDLASKAAQEDKAGNYEEALQLYQHAVQYFLHVVKYEAQGDKAKQSIRAKCTEYLDRAEKLKEYLKNKEKKAQKPVKEGQPSPADEKGNDSDGEGESDDPEKRKLQNQLQGAIVIDRPNVKWSDVAGLEGAKEALKEAVILPIKFPHLFTGKRTPWRGILLFGPPGTGKSYLAKAVATEANNSTFFSISSSDLVSKWLGESEKLVKNLFQLARENKPSIIFIDEIDSLCGSRSENESEAARRIKTEFLVQMQGVGVDNDGILVLGATNIPWVLDSAIRRRFEKRIYIPLPEPHARAAMFKLHLGTTQNSLTEADFRELGRKTDGYSGADIGIIVRDALMQPVRKVQSATHFKKVRGPSRADPNHLVDDLLTPCSPGDPGAIEMTWMDVPGDKLLEPVVSMSDMLRSLSNTKPTVNEHDLLKLKKFTEDFGQEG

SEQ ID NO: 309 - DNA, 958 bp, Homo sapiens
  CDS (60)..(761)
  misc_feature (1)..(234): any Xaa (amino acid residues 1 through 234) is any amino acid
tctaaagctcagtggagctgggtcatctcaggccttggctccttgaacttttggccgccatgtgcttcccgaaggtcctctctgatgacatgaagaagctgaaggcccgaatggtaatgctcctccctacttctgctcaggggttgggggcctgggtctcagcgtgtgacactgaggacactgtgggacacctgggaccctggagggacaaggatccggccctttggtgccaactctgcctctcttcacagcaccaggccatagaaagattttatgataaaatgcaaaatgcagaatcaggacgtggacaggtgatgtcgagcctggcagagctggaggacgacttcaaagagggctacctggagacagtggcggcttattatgaggagcagcacccagagctcactcctctacttgaaaaagaaagagatggattacggtgccgaggcaacagatcccctgtcccggatgttgaggatcccgcaaccgaggagcctggggagagcttttgtracaaggtcatgagatggttccaggccatgctgcagcggctgcagacctggtggcacggggttctggcctgggtgaaggagaaggtggtggccctggtccatgcagtgcaggccctctggaaacagttccagagtttctgctgctctctgtcagagctcttcatgtcctctttccagtcctacggagccccacggggggacaaggaggagctgacaccccagaagtgctctgaaccccaatcctcaaaatgaagatactgacaccacctttgccctccccgtcaccgcgcacccaccctgacccctccctcagctgtcctgtgccccgccctctcccgcacactcagtccccctgcctggcgttcctgccgcagctctgacctggtgctgtcgccctggcatcttaataaaacctgcttatacttccctggcagggagataccatg

SEQ ID NO: 310 - protein, 234 aa, Homo sapiens
  misc_feature (1)..(234): any Xaa is any amino acid
MCFPKVLSDDMKKLKARMVMLLPTSAQGLGAWVSACDTEDTVGHLGPWRDKDPALWCQLCLSSQHQAIERFYDKMQNAESGRGQVMSSLAELEDDFKEGYLETVAAYYEEQHPELTPLLEKERDGLRCRGNRSPVPDVEDPATEEPGESFCXKVMRWFQAMLQRLQTWWHGVLAWVKEKVVALVHAVQALWKQFQSFCCSLSELFMSSFQSYGAPRGDKEELTPQKCSEPQSSK

SEQ ID NO: 311 - DNA, 1974 bp, Homo sapiens
  CDS (433)..(1827)
gaattccgggggtattggcagctgaggagtggaggctgggcagctccgactccctgacgccagcgcgaccagatcaatccaggctccaggagaaagcaggcgggcgggcggagaaaggagaggccgagcggctcaacccgggccgaggctcggggagcggagagtggcgcaccgcccggccgtccggacccgggccgcgagaccccgctcgcccggccactcgtgctcccgcacggacgggcgcgccgccaacccggtgctgactgggttacttttttaaacactaggaatggtaatttctactcttctggacttcaaactaagaagttaaagagacttctctgtaaataaacaaatctcttctgctgtccttttgcatttggagacagctttatttcaccatatccaaggagtataactagtgctgtcattatgaatgtgacaagtttattttcctttacaagtccagctgtgaagagacttcttgggtggaaacagggcgatgaagaagaaaaatgggcagagaaagctgttgatgctttggtgaaaaaactgaagaaaaagaaaggtgccatggaggaactggaaaaggccttgagctgcccagggcaaccgagtaactgtgtcaccattccccgctctctggatggcaggctgcaagtctcccaccggaagggactgcctcatgtcatttactgccgtgtgtggcgctggcccgatcttcagagccaccatgaactaaaaccactggaatgctgtgagtttccttttggttccaagcagaaggaggtctgcatcaatccctaccactataagagagtagaaagccctgtacttcctcctgtgctggttccaagacacagcgaatataatcctcagcacagcctcttagctcagttccgtaacttaggacaaaatgagcctcacatgccactcaacgccacttttccagattctttccagcaacccaacagccacccgtttcctcactctcccaatagcagttacccaaactctcctgggagcagcagcagcacctaccctcactctcccaccagctcagacccaggaagccctttccagatgccagctgatacgcccccacctgcttacctgcctcctgaagaccccatgacccaggatggctctcagccgatggacacaaacatgatggcgcctcccctgccctcagaaatcaacagaggagatgttcaggcggttgcttatgaggaaccaaaacactggtgctctattgtctactatgagctcaacaatcgtgtgggtgaagcgttccatgcctcctccacaagtgtgttggtggatggtttcactgatccttccaacaataagaaccgtttctgccttgggctgctctccaatgttaaccggaattccactattgaaaacaccaggcggcatattggaaaaggagttcatctttattatgttggaggggaggtgtatgccgaatgccttagtgacagtagcatctttgtgcaaagtcggaactgcaactaccatcatggatttcatcctactactgtttgcaagatccctagtgggtgtagtctgaaaatttttaacaaccaagaatttgctcagttattggcacagtctgtgaaccatggatttgagacagtctatgagcttacaaaaatgtgtactatacgtatgagctttgtgaagggctggggagcagaataccaccgccaggatgttactagcaccccctgctggattgagatacatctgcacggccccctccagtggctggataaagttcttactcaaatgggttcacctcataatcctatttcatctgtatcttaaatggccccagcatctgcctctggaaaactattgagccttgcatgtacttgaaggatggatgagtcagacacgattgagaactgacaaaggagccttgataatacttgacctctgtgaccaactgttggattcagaaatttaaac

SEQ ID NO: 312 - protein, 465 aa, Homo sapiens
MNVTSLFSFTSPAVKRLLGWKQGDEEEKWAEKAVDALVKKLKKKKGAMEELEKALSCPGQPSNCVTIPRSLDGRLQVSHRKGLPHVIYCRVWRWPDLQSHHELKPLECCEFPFGSKQKEVCINPYHYKRVESPVLPPVLVPRHSEYNPQHSLLAQFRNLGQNEPHMPLNATFPDSFQQPNSHPFPHSPNSSYPNSPGSSSSTYPHSPTSSDPGSPFQMPADTPPPAYLPPEDPMTQDGSQPMDTNMMAPPLPSEINRGDVQAVAYEEPKHWCSIVYYELNNRVGEAFHASSTSVLVDGFTDPSNNKNRFCLGLLSNVNRNSTIENTRRHIGKGVHLYYVGGEVYAECLSDSSIFVQSRNCNYHHGFHPTTVCKIPSGCSLKIFNNQEFAQLLAQSVNHGFETVYELTKMCTIRMSFVKGWGAEYHRQDVTSTPCWIEIHLHGPLQWLDKVLTQMGSPHNPISSVS

SEQ ID NO: 313 - DNA, 1486 bp, Homo sapiens
  CDS (85)..(843)
tcggacgcgtggtagcctagagtcctggggagcttctgtccacctgtcctgcagaggagtcgtttccagcccggctgccccaggatgggtgagttcaacgagaagaagacaacatgtggcaccgtttgcctcaagtacctgctgtttacctacaattgctgcttctggctggctggcctggctgtcatggcagtgggcatctggacgctggccctcaagagtgactacatcagcctgctggcctcaggcacctacctggccacagcctacatcctggtggtggcgggcactgtcgtcatggtgactggggtcttgggctgctgcgccaccttcaaggagcgtcggaacctgctgcgcctgtacttcatcctgctcctcatcatctttctgctggagatcatcgctggtatcctcgcctacgcctactaccagcagctgaacacggagctcaaggagaacctgaaggacaccatgaccaggcgctaccaccagtcgggccatgaggctgtgaccagcgctgtggaccagctgcagcaggagttccactgctgtggcagcaacaactcacaggactggcgagacagtgagtggatccgctcacaggaggccggtggccgtgtggtcccagacagctgctgcaagacggtggtggctctttgtggacagcgagaccatgcctccaacatctacaaggtggagggcggctgcatcaccaagttggagaccttcatccaggagcacctgagggtcattggggctgtggggatcggcattgcctgtgtgcaggtctttggcatgatcttcacgtgctgcctgtacaggagtctcaagctggagcactactgaccctgccttgggccttgctgctgctgcacccaactactgagctgagaccactgagtaccaggggctgggctccctgatgacacccaccctgtgccatcaccataacctctggggaccccaacctcagaggcagcttcaagtgccttttcgtgcgcaccaatgcccagcaggggaggtgaggggggctggcggggcgaagtttggggggtgttttgtggggctccccggacatactctctgcctggtggtcagatgcaggttggaaggggccttgctgagtggcgcaaggccgagatcgttcccagcagggggagaaacccttcacaccccaggcccttcaggaactggggctttgccttgcagccacatggccccatcccagttggggaagccaggtgagctctgacccttgggcctgggcctctgcccctcccaacccagccgtcgtctccctcgacagcgcccctgctgtcttccccaccgcagtcaccaccacccgaaatgccacgtggtcactgtgcactgccctgttcatgtgcctctgcggggcagggccttcctggttttgtacactgctgtacccagatgcctacaaccatccctgccacatacaggtgctcaataaacacttgtagagcag

SEQ ID NO: 314 - protein, 253 aa, Homo sapiens [sequence omitted]

SEQ ID NO: 315 - DNA, 1580 bp, Homo sapiens
  CDS (79)..(1578)
atcccctccggttttcctcagtctccacgtacgtccctcaaagcgcgtcctaaaacccggataaccggagcgctccccatggaccacacggagggcttgcccgcggaggagccgcctgcgcatgctccatcgcctgggaaatttggtgagcggcctccacctaaacgacttactagggaagctatgcgaaattatttaaaagagcgaggggatcaaacagtacttattcttcatgcaaaagttgcacagaagtcatatggaaatgaaaaaaggtttttttgcccacctccttgtgtatatcttatgggcagcggatggaagaaaaaaaaagaacaaatggaacgcgatggttgttctgaacaagagtctcaaccgtgtgcatttattgggataggaaatagtgaccaagaaatgcagcagctaaacttggaaggaaagaactattgcacagccaaaacattgtatatatctgactcagacaagcgaaagcacttcattttttctgtaaagatgttctatggcaacagtgatgacattggtgtgttcctcagcaagcggataaaagtcatctccaaaccttccaaaaagaagcagtcattgaaaaatgctgacttatgcattgcctcaggaacaaaggtggctctgtttaatcgactacgatcccagacagttagtaccagatacttgcatgtagaaggaggtaattttcatgccagttcacagcagtggggagccttttttattcatctcttggatgatgatgaatcagaaggagaagaattcacagtccgagatgtctacatccattatggacaaacatgcaaacttgtgtgctcagttactggcatggcactcccaagattgataattatgaaagttgataagcataccgcattattggatgcagatgatcctgtgtcacaactccataaatgtgcattttaccttaaggatacagaaagaatgtatttgtgcctttctcaagaaagaataattcaatttcaggccactccatgtccaaaagaaccaaataaagagatgataaatgatggcgcttcctggacaatcattagcacagataaggcagagtatacattttatgagggaatgggccctgtccttgccccagtcactcctgtgcctgtggtagagagccttcagttgaatggcggtggggacgtagcaatgcttgaacttacaggacagaatttcactccaaatttacgagtgtggtttggggatgtagaagctgaaactatgtacaggtgtggagagagtatgctctgtgtcgtcccagacatttctgcattccgagaaggttggagatgggtccggcaaccagtccaggttccagtaactttggtccgaaatgatggaatcatttattccaccagccttacctttacctacacaccagaaccagggccacggccacattgcagtgtagcaggagcaatccttccagccaattcaagccaggtgccccctaacgaatcaaacacaaacagcgagggaagttacacaaacgccagcacaaattcaaccagtgtcacatcatctacagccacagtggtatccta

SEQ ID NO: 316 - protein, 500 aa, Homo sapiens
MDHTEGLPAEEPPAHAPSPGKFGERPPPKRLTREAMRNYLKERGDQTVLILHAKVAQKSYGNEKRFFCPPPCVYLMGSGWKKKKEQMERDGCSEQESQPCAFIGIGNSDQEMQQLNLEGKNYCTAKTLYISDSDKRKHFIFSVKMFYGNSDDIGVFLSKRIKVISKPSKKKQSLKNADLCIASGTKVALFNRLRSQTVSTRYLHVEGGNFHASSQQWGAFFIHLLDDDESEGEEFTVRDVYIHYGQTCKLVCSVTGMALPRLIIMKVDKHTALLDADDPVSQLHKCAFYLKDTERMYLCLSQERIIQFQATPCPKEPNKEMINDGASWTIISTDKAEYTFYEGMGPVLAPVTPVPVVESLQLNGGGDVAMLELTGQNFTPNLRVWFGDVEAETMYRCGESMLCVVPDISAFREGWRWVRQPVQVPVTLVRNDGIIYSTSLTFTYTPEPGPRPHCSVAGAILPANSSQVPPNESNTNSEGSYTNASTNSTSVTSSTATVVS

SEQ ID NO: 317 - DNA, 1762 bp, Homo sapiens
  CDS (14)..(1216)
cttcttccgcaagatgtcatcctcaggggccaaggacaagcctgagctgcagtttcccttccttcaggatgaggacacagtggccacgctgctagagtgcaagacgctcttcatcttgcgcggcctgccaggaagcggcaagtccacgctggcacgggtcatcgtggacaagtaccgtgatggcaccaagatggtgtcggctgacgcttacaagatcacccccggcgctcgaggagccttctccgaggagtacaagcggctcgatgaggacctggctgcctactgccgccgccgggacatcagaattcttgtgcttgatgacaccaaccacgaacgggaacggctggagcagctctttgaaatggccgaccagtaccagtaccaggtggtgctggtggagcccaagacggcgtggcggctggactgtgcccagctcaaggagaagaaccagtggcagctgtcggctgatgacctgaagaagctgaagcctgggctggagaaggacttcctgccgctctacttcggctggttcctgaccaagaagagctctgagaccctccgcaaagccggccaggtcttcctggaagagctggggaaccacaaggccttcaagaaggagctgcgacaattcgtccctggggatgagcccagggagaagatggacttggtcacctactttggaaagagacccccaggcgtgctgcattgcacaaccaagttttgtgactacgggaaggctcccggggcagaggagtacgctcaacaagatgtgttaaagaaatcttactccaaggccttcacgctgaccatctctgccctctttgtgacacccaagacgactggggcccgggtggagttaagcgagcagcaactgcagttgtggccgagtgatgtggacaagctgtcacccactgacaacctgccgcgggggagccgcgcccacatcaccctcggctgtgcagctgacgtagaggccgtgcagacgggccttgacctcttagagattctgcggcaggagaaggggggcagccgaggcgaggaggtgggcgagctaagccggggcaagctctattccttgggcaatgggcgctggatgctgaccctggccaagaacatggaggtcagggccatcttcacggggtactacgggaaaggcaaacctgtgcccacgcaaggtagccggaaggggggcgccttgcagtcctgcaccatcatatgagtgttctcaccaccacttatgcccctagaagggaaggggagagggaaacgtgccctctgtttgatccttgttttgtgacatttttttttttttttttttttactcaaagttaacctacctgtaactttttaaaaacttgtaaaataactgaccctcccttcctgtccgccctcttcccctctaatgctcacgctcccaacacaaggtgggcagggaggcaccattcaggaacctggaccaaagctgacgaggctgggccaagccagggatggggccacagccagaaccccgagccctacttccaggttctggttagctcagccccagcccagcccagctgctctgcccagagctgggtgagtggggagacacctcagagccccgcaaaacccactgaccggaggcaaaaggcagtggggctgggggtagttttccatggtcacagagaactagtggtggctctgagaaggggaggacctctgggctttgattccatctccttgtcttttttctttgtttttagagacagggtcctgctatttc

SEQ ID NO: 318 - protein, 401 aa, Homo sapiens
MSSSGAKDKPELQFPFLQDEDTVATLLECKTLFILRGLPGSGKSTLARVIVDKYRDGTKMVSADAYKITPGARGAFSEEYKRLDEDLAAYCRRRDIRILVLDDTNHERERLEQLFEMADQYQYQVVLVEPKTAWRLDCAQLKEKNQWQLSADDLKKLKPGLEKDFLPLYFGWFLTKKSSETLRKAGQVFLEELGNHKAFKKELRQFVPGDEPREKMDLVTYFGKRPPGVLHCTTKFCDYGKAPGAEEYAQQDVLKKSYSKAFTLTISALFVTPKTTGARVELSEQQLQLWPSDVDKLSPTDNLPRGSRAHITLGCAADVEAVQTGLDLLEILRQEKGGSRGEEVGELSRGKLYSLGNGRWMLTLAKNMEVRAIFTGYYGKGKPVPTQGSRKGGALQSCTII

SEQ ID NO: 319 - DNA, 2113 bp, Homo sapiens
  CDS (138)..(1583)
gggcagcggcagcggcggcgggacgcggaggctcccccgggattcggcctcagcagcgaggcggcggcggcggctgcggaggcgcaggcagcaactgaggcagcggcaggctcaggtgcagccgctgctcaaagaaaatgaacggcaccctggaccacccagaccaaccagatcttgatgctatcaagatgtttgtgggccaggttccaaggacctggtctgaaaaggacttgcgggaactcttcgaacagtatggtgctgtgtatgaaatcaacgtcctaagggataggagccaaaacccgcctcagagcaaagggtgctgttttgttacattttacacccgtaaagctgcattagaagctcagaatgctcttcacaacatgaaagtcctcccagggatgcatcaccctatacagatgaaacctgctgacagtgagaagaacaatgcagtggaagacaggaagctgtttattggtatgatttccaagaagtgcactgaaaatgacatccgagtcatgttctcttcgtttggacagattgaagaatgccggatattgcggggacctgatggcctgagccgaggttgtgcatttgtgacttttacaacaagagccatggcacagacggctatcaaggcaatgcaccaagcacagaccatggagggttgctcatcacccatggtggtaaaatttgctgatacacagaaggacaaagaacagaagagaatggcccagcagctccagcagcagatgcagcaaatcagcgcagcatctgtgtggggaaaccttgctggtctaaatactcttggaccccagtatttagcactccttcagcagactgcctcctctgggaacctcaacaccctgagcagcctccacccaatgggagggttgaatgcaatgcagttacagaatttggctgcactagctgctgcagctagtgcagctcagaacacaccaagtggtaccaatgctctcactacatccagcagtcccctcagcgtgctcactagttcagggtcctcacctagctctagcagcagtaattctgtcaaccccatagcctcacttggagccctgcagacattagctggagcaacggctggcctcaatgttggctctttggcaggaatggctgctttaaatggtggcctgggcagcagtggcctttccaatggcaccgggagcaccatggaggccctcactcaggcctactcgggtatccagcaatatgctgctgctgcgctccccactctgtacaaccagaatcttctgacacagcagagtattggtgctgctggaagccagaaggaaggtccagagggagccaacctgttcatctaccacctgccccaggagtttggtgatcaggacctgctgcagatgtttatgccctttgggaatgtcgtgtctgccaaggttttcatagacaagcagacaaacctgagcaagtgttttggttttgtaagttacgacaatcctgtttcggcccaagctgccatccagtccatgaacggctttcagattggcatgaagcggcttaaagtgcagctcaaacgttcgaagaatgacagcaagccctactgagcgtgctcccctctgagactggagtgagagggtcttctgattcctgccgtttgttcatcgttgtgcctaaagcatgtcgatgtggcgtcaagtacatcgtccaaatccctgtctcttcagcttctctgatgcttgaactctcacctttgaccttgtgttgacctttgatgctgatgtgtatttttattatgtttgtttctttcttcgtttttttttctttttttctttcctttttttttccttttgtgctgccaaattggttttgctagaacgactgctgaaggggaaatatttaaacttgcatttgaatataaaaaaaatctatttttctagaacttcataagataaccacttgattttgtgattccaattctttgtaattgtcttcagagcagccctactagcacataccgcgtggtgtttgtatttctgtgaacacacagccagtccgtttctaggctttgtttctctgtgtgcttagttttaaagacaactttgaagtaaacaatgaaataaaagatgtcact

SEQ ID NO: 320 - protein, 482 aa, Homo sapiens
MNGTLDHPDQPDLDAIKMFVGQVPRTWSEKDLRELFEQYGAVYEINVLRDRSQNPPQSKGCCFVTFYTRKAALEAQNALHNMKVLPGMHHPIQMKPADSEKNNAVEDRKLFIGMISKKCTENDIRVMFSSFGQIEECRILRGPDGLSRGCAFVTFTTRAMAQTAIKAMHQAQTMEGCSSPMVVKFADTQKDKEQKRMAQQLQQQMQQISAASVWGNLAGLNTLGPQYLALLQQTASSGNLNTLSSLHPMGGLNAMQLQNLAALAAAASAAQNTPSGTNALTTSSSPLSVLTSSGSSPSSSSSNSVNPIASLGALQTLAGATAGLNVGSLAGMAALNGGLGSSGLSNGTGSTMEALTQAYSGIQQYAAAALPTLYNQNLLTQQSIGAAGSQKEGPEGANLFIYHLPQEFGDQDLLQMFMPFGNVVSAKVFIDKQTNLSKCFGFVSYDNPVSAQAAIQSMNGFQIGMKRLKVQLKRSKNDSKPY

SEQ ID NO: 321 - DNA, 2163 bp, Homo sapiens
  CDS (113)..(1717)
gcggagcgcagctgtgagggagtcgctgtgatccggggccccggaacccgagctggagctgaagcgcaggctgcggggcgcggagtcgggaggcctgagtgttccttccagcatgtcggagggggagtcccagacagtacttagcagtggctcagacccaaaggtagaatcctcatcttcagctcctggcctgacatcagtgtcacctcctgtgacctccacaacctcagctgcttccccagaggaagaagaagaaagtgaagatgagtctgagattttggaagagtcgccctgtgggcgctggcagaagaggcgagaagaggtgaatcaacggaatgtaccaggtattgacagtgcatacctggccatggatacagaggaaggtgtagaggttgtgtggaatgaggtacagttctctgaacgcaagaactacaagctgcaggaggaaaaggttcgtgctgtgtttgataatctgattcaattggagcatcttaacattgttaagtttcacaaatattgggctgacattaaagagaacaaggccagggtcatttttatcacagaatacatgtcatctgggagtctgaagcaatttctgaagaagaccaaaaagaaccacaagacgatgaatgaaaaggcatggaagcgttggtgcacacaaatcctctctgccctaagctacctgcactcctgtgacccccccatcatccatgggaacctgacctgtgacaccatcttcatccagcacaacggactcatcaagattggctctgtggctcctgacactatcaacaatcatgtgaagacttgtcgagaagagcagaagaatctacacttctttgcaccagagtatggagaagtcactaatgtgacaacagcagtggacatctactcctttggcatgtgtgcactggagatggcagtgctggagattcagggcaatggagagtcctcatatgtgccacaggaagccatcagcagtgccatccagcttctagaagacccattacagagggagttcattcaaaagtgcctgcagtctgagcctgctcgcagaccaacagccagagaacttctgttccacccagcattgtttgaagtgccctcgctcaaactccttgcggcccactgcattgtgggacaccaacacatgatcccagagaacgctctagaggagatcaccaaaaacatggatactagtgccgtactggctgaaatccctgcaggaccaggaagagaaccagttcagactttgtactctcagtcaccagctctggaattagataaattccttgaagatgtcaggaatgggatctatcctctgacagcctttgggctgcctcggccccagcagccacagcaggaggaggtgacatcacctgtcgtgcccccctctgtcaagactccgacacctgaaccagctgaggtggagactcgcaaggtggtgctgatgcagtgcaacattgagtcggtggaggagggagtcaaacaccacctgacacttctgctgaagttggaggacaaactgaaccggcacctgagctgtgacctgatgccaaatgagaatatccccgagttggcggctgagctggtgcagctgggcttcattagtgaggctgaccagagccggttgacttctctgctagaagagaccttgaacaagttcaattttgccaggaacagtaccctcaactcagccgctgtcaccgtctcctcttagagctcactcgggccaggccctgatctgcgctgtggctgtccctggacgtgctgcagccctcctgtcccttccccccagtcagtattaccctgtgaagccccttccctcctttattattcaggagggctgggggggctccctggttctgagcatcatcctttcccctcccctctcttcctcccctctgcactttgtttacttgttttgcacagacgtgggcctgggccttctcagcagccgccttctagttgggggctagtcgctgatctgccggctcccgcccagcctgtgtggaaaggaggcccacgggcactaggggagccgaattctacaatcccgctggggcggccggggcgggagagaaaggtggtgctgcagtggtggccctggggggccattcgattcgcctcagttgctgctgtaataaaagtctactttttgct

SEQ ID NO: 322 - protein, 535 aa, Homo sapiens
MSEGESQTVLSSGSDPKVESSSSAPGLTSVSPPVTSTTSAASPEEEEESEDESEILEESPCGRWQKRREEVNQRNVPGIDSAYLAMDTEEGVEVVWNEVQFSERKNYKLQEEKVRAVFDNLIQLEHLNIVKFHKYWADIKENKARVIFITEYMSSGSLKQFLKKTKKNHKTMNEKAWKRWCTQILSALSYLHSCDPPIIHGNLTCDTIFIQHNGLIKIGSVAPDTINNHVKTCREEQKNLHFFAPEYGEVTNVTTAVDIYSFGMCALEMAVLEIQGNGESSYVPQEAISSAIQLLEDPLQREFIQKCLQSEPARRPTARELLFHPALFEVPSLKLLAAHCIVGHQHMIPENALEEITKNMDTSAVLAEIPAGPGREPVQTLYSQSPALELDKFLEDVRNGIYPLTAFGLPRPQQPQQEEVTSPVVPPSVKTPTPEPAEVETRKVVLMQCNIESVEEGVKHHLTLLLKLEDKLNRHLSCDLMPNENIPELAAELVQLGFISEADQSRLTSLLEETLNKFNFARNSTLNSAAVTVSS

SEQ ID NO: 323 - DNA, 3365 bp, Homo sapiens
  CDS (99)..(2675)
agcatccggagcggagctgcagcagcgccgccttttgtgctgcggccgcggagcccccgagggcccagtgttcaccatcataccaggggccagaggcgatggcttgcctccatgagacccgaacaccctctccttcctttgggggctttgtgtctaccctaagtgaggcatccatgcgcaagctggacccagacacttctgactgcactcccgagaaggacctgacgcctacccatgtcctgcagctacatgagcaggatgcagggggcccagggggagcagctgggtcacctgagagtcgggcatccagagttcgagctgacgaggtgcgactgcagtgccagagtggcagtggcttccttgagggcctctttggctgcctgcgccctgtctggaccatgattggcaaagcctactccactgagcacaagcagcagcaggaagacctttgggaggtcccctttgaggaaatcctggacctgcagtgggtgggctcaggggcccagggtgctgtcttcctggggcgcttccacggggaggaggtggctgtgaagaaggtgcgagacctcaaagaaaccgacatcaagcacttgcgaaagctgaagcaccccaacatcatcactttcaagggtgtgtgcacccaggctccctgctactgcatcctcatggagttctgcgcccagggccagctgtatgaggtactgcgggctggccgccctgtcaccccctccttactggttgactggtccatgggcatcgctggtggcatgaactacctgcacctgcacaagattatccacagggatctcaagtcacccaacatgctaatcacctacgacgatgtggtgaagatctcagattttggcacttccaaggagctgagtgacaagagcaccaagatgtcctttgcagggacagtagcctggatggcccctgaggtgatccgcaatgaacctgtgtctgagaaggtcgacatctggtcctttggcgtggtgctatgggaactgctgactggtgagatcccctacaaagacgtagattcctcagccattatctggggtgtgggaagcaacagtctccatctgcccgtgccctccagttgcccagatggtttcaagatcctgcttcgccagtgctggaatagcaaaccacgaaatcgcccatcattccgacagatcctgctgcatctggacattgcctcagctgatgtactctccacaccccaggagacttactttaagtcccaggcagagtggcgggaagaagtaaaactgcactttgaaaagattaagtcagaagggacctgtctgcaccgcctagaagaggaactggtgatgaggaggagggaggagctcagacacgccctggacatcagggagcactatgaaaggaagctggagagagccaacaacctgtatatggaacttaatgccctcatgttgcagctggaactcaaggagagggagctgctcaggcgagagcaagctttagagcggaggtgcccaggcctgctgaagccacacccttcccggggcctcctgcatggaaacacaatggagaagcttatcaagaagaggaatgtgccacagaatctgtcaccccatagccaaaggccagatatcctcaaggcggagtctttgctccctaaactagatgcagccctgagtggggtggggcttcctgggtgtcctaaggcccccccctcaccaggacggagtcgccgtggcaagacccgtcaccgcaaggccagcgccaaggggagctgtggggacctgcctgggcttcgtacagctgtgccaccccatgaacctggaggaccaggaagcccagggggcctaggagggggaccctcagcctgggaggcctgccctcccgccctccgtgggcttcatcatgacctcctgctccgcaaaatgtcttcatcgtccccagacctgctgtcagcagcactagggtcccggggccggggggccacaggcggagctggggatcctggctcaccacctccggcccggggtgacaccccaccaagtgagggctcagcccctggctccaccagcccagattcacctgggggagccaaaggggaaccacctcctccagtagggcctggtgaaggtgtggggcttctgggaactggaagggaagggacctcaggccggggaggaagccgggctgggtcccagcacttgaccccagctgcactgctgtacagggctgccgtcacccgaagtcagaaacgtggcatctcatcggaagaggaggaaggagaggtagacagtgaagtagagctgacatcaagccagaggtggcctcagagcctgaacatgcgccagtcactatctaccttcagctcagagaatccatcagatggggaggaaggcacagctagtgaaccttcccccagtggcacacctgaagttggcagcaccaacactgatgagcggccagatgagcggtctgatgacatgtgctcccagggctcagaaatcccactggacccacctccttcagaggtcatccctggccctgaacccagctccctgcccattccacaccaggaacttctcagagagcggggccctcccaattctgaggactcagactgtgacagcactgaattggacaactccaacagcgttgatgccttgcgccccccagcttccctccctccatgaaagccactcgtattccttgtacatagagaaatatttatatggattatatatatatacatatatatatatatatgcgccacataatcaacagaaagatggggctgtcccagccgtaagtcaggctcgagggagactgatcccctgaccaattcacctgataaactctagggacactggcagctgtggaaatgaatgaggcacagccgtagagctgtggctaagggcaagccccttcctgccccaccccattccttatattcagcaagcaacaaggcaatagaaaagccagggttgtctttatattctttatccccaaataatagggggtggggggaggggcggtgggaggggcaggagagaaaaccacttagactgcacttttctgttccgtttactctgtttacacattttgcacttgggaggagggaggctaaggctgggtcctcccctctgaggtttctcaggtggcaatgtaactcatttttttgtcccaccatttatcttctctgcccaagccctgtcttaaggcccagggggaggttaggagactgatagcatgtgatggctcaggctgaagaaccggggttctgtttaagtccctgcttttatcctggtgcctgattggggtggggactgtcctactgtaacccctgtgaaaaaccttgaaaaataacactccatgcagga

SEQ ID NO: 324 - protein, 859 aa, Homo sapiens [sequence omitted]

SEQ ID NO: 325 - DNA, 1324 bp, Homo sapiens
  CDS (11)..(637)
ggaccccgaaatggcgctgctggcggagcacttgctgaagccgctgcccgcggacaagcagatcgagaccgggcccttcctcgaggcggtgtcccacctgccgcccttcttcgattgccttgggtccccagtgtttactcccatcaaggcagacataagcggcaacatcacgaaaatcaaagctgtgtacgacaccaacccagccaagttccggaccctgcagaacatcctggaggtggagaaagaaatgtatggagcagagtggcccaaagtaggggccacactggcgctgatgtggctgaaaagaggcctccgcttcatccaggtcttcctccagagcatctgcgacggggagcgggacgagaaccaccccaacctcatccgtgtcaacgccaccaaggcctacgagatggccctcaagaagtaccatggctggatcgtgcagaagatcttccaggcagcactgtacgcagcaccctataagtctgacttcctgaaagcgctctccaaggggcagaatgttacggaggaggagtgcctggagaagatccgcctcttcctagtcaactacacggcgaccatcgatgtcatctacgagatgtacacccagatgaacgctgagctcaactacaaggtgtagtgcccactgctggacacgttcccgactcgtgggcacatggagaaacaggtaaaccagaatcactgtgaatcaagtcggtgaactgcccctggcctgtgtcccccagagcagcccagggtcctgccagagtctgcaggggacagccctcgttttttaagtctttttttttttttttttggtctattctaaaggaccagtaaataatgatcttacttccaaatctccttggaatttcacgacagcacagactgactttataccttcatttcagcgtggtaaaaaccgattaacacttctaatgagtcaagtcctagggttttttggttttgttttgttgccaacgaggaacacagctttggggaatggtgtcatccacctcgctttaaaaataagcacatgatggctgggcaccgtggcttacgcctgtaatcccagcactttgggaggctgaggcgggtggatcacctgagggcgggagtttgagacaacctggccaacatggtgaaaccccatcgcttctaaaaatataaaaaattagctgggcatggtggcgcacgcctgtagttccagctcctcaggtggctgaggcaggaaaatcgctttaacccggaaggtgaaggttgcagtgaactgagatcgccccattgcactccagcctgggcaacaagagcgaaactctgtctc

SEQ ID NO: 326 - protein, 209 aa, Homo sapiens
MALLAEHLLKPLPADKQIETGPFLEAVSHLPPFFDCLGSPVFTPIKADISGNITKIKAVYDTNPAKFRTLQNILEVEKEMYGAEWPKVGATLALMWLKRGLRFIQVFLQSICDGERDENHPNLIRVNATKAYEMALKKYHGWIVQKIFQAALYAAPYKSDFLKALSKGQNVTEEECLEKIRLFLVNYTATIDVIYEMYTQMNAELNYKV

SEQ ID NO: 327 - DNA, 1451 bp, Homo sapiens
  CDS (72)..(1046)
tgtcgacgccgctgccaccgcctgcctgagagaagtcgtcgcggccgaccccgtcgcctccgccggctaccatgtccgcccaggcgcagatgcgggccctgctggaccagctcatgggcacggctcgggacggagacgaaaccagacaaagggtcaagtttacagatgaccgtgtctgcaagagtcaccttctggactgctgcccccatgacatcctggctgggacgcgcatggatttaggagaatgtaccaaaatccacgacttggccctccgagcagattatgagattgcaagtaaagaaagagacctgttttttgaattagatgcaatggatcacttggagtcctttattgctgaatgtgatcggagaactgagctcgccaagaagcggctggcagaaacacaggaggaaatcagtgcggaagtttctgcaaaggcagaaaaagtacatgagttaaatgaagaaataggaaaactccttgctaaagccgaacagctaggggctgaaggtaatgtggatgaatcccagaagattcttatggaagtggaaaaagttcgtgcgaagaaaaaagaagctgaggaagaatacagaaattccatgcctgcatccagttttcagcagcaaaagctgcgtgtctgcgaggtctgttcagcctaccttggtctccatgacaatgaccgtcgcctggcagaccacttcggtggcaagttacacttggggttcattcagatccgagagaagcttgatcagttgaggaaaactgtcgctgaaaagcaggagaagagaaatcaggatcgcttgaggaggagagaggagagggaacgggaggagcgtctgagcaggaggtcgggatcaagaaccagagatcgcaggaggtcacgctcccgggatcggcgtcggaggcggtcaagatctacctcccgagagcgacggaaattgtcccggtcccggtcccgagatagacatcggcgccaccgcagccgttcccggagccacagccggggacatcgtcgggcttcccgggaccgaagtgcgaaatacaagtaactactctgactccttcggtagctgcaaccaggggttctccagagagcgggcatccagagaggagtcctgggagagcgggcggagcgagcgagggcccccggactggaggcttgagagctccaacgggaagatggcttcacggaggtcagaagagaaggaggccggcgagatctgaacccgtctcccgggtgctgtaaatagtctgataaacgttcacacagtctaaaattaccctttatatttgctgaatacaactcatcttttgtagtttaaaatttctattgttttggagctagctgtgagtttctagaagtgtacagagttgctcctgtgttcccgggtcatgttgagtaggaataaataaatctgatgctgcctcctgaggctgcggggggtttctgc

SEQ ID NO: 328 - protein, 325 aa, Homo sapiens
MSAQAQMRALLDQLMGTARDGDETRQRVKFTDDRVCKSHLLDCCPHDILAGTRMDLGECTKIHDLALRADYEIASKERDLFFELDAMDHLESFIAECDRRTELAKKRLAETQEEISAEVSAKAEKVHELNEEIGKLLAKAEQLGAEGNVDESQKILMEVEKVRAKKKEAEEEYRNSMPASSFQQQKLRVCEVCSAYLGLHDNDRRLADHFGGKLHLGFIQIREKLDQLRKTVAEKQEKRNQDRLRRREEREREERLSRRSGSRTRDRRRSRSRDRRRRRSRSTSRERRKLSRSRSRDRHRRHRSRSRSHSRGHRRASRDRSAKYK

SEQ ID NO: 329 - DNA, 1289 bp, Homo sapiens
  CDS (16)..(1200)
tctcctctctccgccatggctgttgctcgcccactgatatccgtgtactccgaaaagggggagtcatctggcaaaaatgtcactttgcctgctgtcttcaaggctcctattcgaccagatatggtgaactttgttcacaccaacttgcgcaaaaacaacagacagccctatgctgtcagtgaattagcaggtcatcagactagagctgagtcttggggtactggcagagctgtggctcgaattcccagagttcgaggtggtgggactcaccgctctggccagggtgcttttggaaacatgtgtcgtggaggccgaatgtttgcaccaaccaaaacctggcgccgttggcatcgtagagtgaacacaacccaaaaacgatacgccatctgttctgccctggctgcctcagccctaccagcactggtcatgtctaaaggtcatcgtattgaggagttccctgaacttcctttggtagttgaagataaagttgaaggctacaagaagaccaaggaagctgttttgctccttaagaaacttaaagcctggaatgatatcaaaaaggtctatgcctctcagcgaatgagagctggcaaaggcaaaatgagaaaccgtcgtatccagcgcaggggcccgtgcatcatctataatgaggataatggtatcatcaaggccttcagaaacatccctggaattactctgcttaatgtaagcaagctgaacattttgaagcttgctcctggtgggcatgtgggacgtttctgcatttggactgaaagtgctttccggaagttagatgaattgtacggcacttggcgtaaagccgcttccctcaagagtaactacaatcttcccatgcacaagatgattaatacagatcttagcagaatcttgaaaagcccagagatccaaagagcccttcgagcaccacgcaagaagatccatcgcagagtcctaaagaagaacccactgaaaaacttgagaatcatgttgaagctaaacccatatgcaaagaccatgcgccggaacaccattcttcgccaggccaggaatcacaagctccgggtggataaggcagctgctgcagcagcggcactacaagccaaatcagatgagaaggcggcggttgcaggcaagaaaccagcccctgaaaagaagcctgcagagaagaaacctactacagaggagaagaagcctgctgcataaactcttaaatttgattattccataaaggtcaaatcattttggacagcttcttttgaataaagacctgttatacaggcagtgagaaa

SEQ ID NO: 330 - protein, 395 aa, Homo sapiens
MAVARPLISVYSEKGESSGKNVTLPAVFKAPIRPDMVNFVHTNLRKNNRQPYAVSELAGHQTRAESWGTGRAVARIPRVRGGGTHRSGQGAFGNMCRGGRMFAPTKTWRRWHRRVNTTQKRYAICSALAASALPALVMSKGHRIEEFPELPLVVEDKVEGYKKTKEAVLLLKKLKAWNDIKKVYASQRMRAGKGKMRNRRIQRRGPCIIYNEDNGIIKAFRNIPGITLLNVSKLNILKLAPGGHVGRFCIWTESAFRKLDELYGTWRKAASLKSNYNLPMHKMINTDLSRILKSPEIQRALRAPRKKIHRRVLKKNPLKNLRIMLKLNPYAKTMRRNTILRQARNHKLRVDKAAAAAAALQAKSDEKAAVAGKKPAPEKKPAEKKPTTEEKKPAA

SEQ ID NO: 331 - DNA, 1382 bp, Homo sapiens
  CDS (16)..(1293)
tctcctctctccgccatggctgttgctcgcccactgatatccgtgtactccgaaaagggggagtcatctggcaaaaatgtcactttgcctgctgtcttcaaggctcctattcgaccagatatggtgaactttgttcacaccaacttgcgcaaaaacaacagacagccctatgctgtcagtgaattagcaggtcatcagactagagctgagtcttggggtactggcagagctgtggctcgaattcccagagttcgaggtggtgggactcaccgctctggccagggtgcttttggaaacatgtgtcgtggaggccgaatgtttgcaccaaccaaaacctggcgccgttggcatcgtagagtgaacacaacccaaaaacgatacgccatctgttctgccctggctgcctcagccctaccagcactggtcatgtctaaaggtcatcgtattgaggagttccctgaacttcctttggtagttgaagataaagttgaaggctacaagaagaccaaggaagctgttttgctccttaagaaacttaaagcctggaatgatatcaaaaaggtctatgcctctcagcgaatgagagctggcaaaggcaaaatgagaaaccgtcgtatccagcgcaggggcccgtgcatcatctataatgaggataatggtatcatcaaggccttcagaaacatccctggaattactctgcttaatgtaagcaagctgaacattttgaagcttgctcctggtgggcatgtgggacgtttctgcatttggactgaaagtgctttccggaagttagatgaattgtacggcacttggcgtaaagccgcttccctcaagagtaactacaatcttcccatgcacaagatgattaatacagatcttagcagaatcttgaaaagcccagagatccaaagagcccttcgagcaccacgcaagaagatccatcgcagagtcctaaagaagaacccactgaaaaacttgagaatcatgttgaagctaaacccatatgcaaagaccatgcgccggaacaccattcttcgccaggccaggaatcacaagctccgggtggataaggcagctgctgcagcagcggcactacaagccaaatcagatgagaaggcggcggttgcaggcaagaagcctgtggtaggtaagaaaggaaagaaggctgctgttggtgttaagaagcagaagaagcctctggtgggaaaaaaggcagcagctaccaagaaaccagcccctgaaaagaagcctgcagagaagaaacctactacagaggagaagaagcctgctgcataaactcttaaatttgattattccataaaggtcaaatcattttggacagcttcttttgaataaagacctgttatacaggcagtgagaaa

SEQ ID NO: 332 - protein, 426 aa, Homo sapiens
MAVARPLISVYSEKGESSGKNVTLPAVFKAPIRPDMVNFVHTNLRKNNRQPYAVSELAGHQTRAESWGTGRAVARIPRVRGGGTHRSGQGAFGNMCRGGRMFAPTKTWRRWHRRVNTTQKRYAICSALAASALPALVMSKGHRIEEFPELPLVVEDKVEGYKKTKEAVLLLKKLKAWNDIKKVYASQRMRAGKGKMRNRRIQRRGPCIIYNEDNGIIKAFRNIPGITLLNVSKLNILKLAPGGHVGRFCIWTESAFRKLDELYGTWRKAASLKSNYNLPMHKMINTDLSRILKSPEIQRALRAPRKKIHRRVLKKNPLKNLRIMLKLNPYAKTMRRNTILRQARNHKLRVDKAAAAAAALQAKSDEKAAVAGKKPVVGKKGKKAAVGVKKQKKPLVGKKAAATKKPAPEKKPAEKKPTTEEKKPAA

SEQ ID NO: 333 - DNA, 2742 bp, Homo sapiens
  CDS (150)..(1628)
ctagtattctactagaactggaagattgctctccgagttttttttttgttattttgttaaaaaataaaaagcttgagcagcaattcatattactgtcacaggtatttttgctgtgctgtgcaaggtaactctgctagctaagattcacaatgttgaaagcccttttcctaactatgctgactctggcgctggtcaagtcacaggacaccgaagaaaccatcacgtacacgcaatgcactgacggatatgagtgggatcctgtgagacagcaatgcaaagatattgatgaatgtgacattgtcccagacgcttgtaaaggtggaatgaagtgtgtcaaccactatggaggatacctctgccttccgaaaacagcccagattattgtcaataatgaacagcctcagcaggaaacacaaccagcagaaggaacctcaggggcaaccaccggggttgtagctgccagcagcatggcaaccagtggagtgttgcccgggggtggttttgtggccagtgctgctgcagtcgcaggccctgaaatgcagactggccgaaataactttgtcatccggcggaacccagctgaccctcagcgcattccctccaacccttcccaccgtatccagtgtgcagcaggctacgagcaaagtgaacacaacgtgtgccaagacatagacgagtgcactgcagggacgcacaactgtagagcagaccaagtgtgcatcaatttacggggatcctttgcatgtcagtgccctcctggatatcagaagcgaggggagcagtgcgtagacatagatgaatgtaccatccctccatattgccaccaaagatgcgtgaatacaccaggctcattttattgccagtgcagtcctgggtttcaattggcagcaaacaactatacctgcgtagatataaatgaatgtgatgccagcaatcaatgtgctcagcagtgctacaacattcttggttcattcatctgtcagtgcaatcaaggatatgagctaagcagtgacaggctcaactgtgaagacattgatgaatgcagaacctcaagctacctgtgtcaatatcaatgtgtcaatgaacctgggaaattctcatgtatgtgcccccagggataccaagtggtgagaagtagaacatgtcaagatataaatgagtgtgagaccacaaatgaatgccgggaggatgaaatgtgttggaattatcatggcggcttccgttgttatccacgaaatccttgtcaagatccctacattctaacaccagagaaccgatgtgtttgcccagtctcaaatgccatgtgccgagaactgccccagtcaatagtctacaaatacatgagcatccgatctgataggtctgtgccatcagacatcttccagatacaggccacaactatttatgccaacaccatcaatacttttcggattaaatctggaaatgaaaatggagagttctacctacgacaaacaagtcctgtaagtgcaatgcttgtgctcgtgaagtcattatcaggaccaagagaacatatcgtggacctggagatgctgacagtcagcagtatagggaccttccgcacaagctctgtgttaagattgacaataatagtggggccattttcattttagtcttttctaagagtcaaccacaggcatttaagtcagccaaagaatattgttaccttaaagcactattttatttatagatatatctagtgcatctacatctctatactgtacactcacccataacaaacaattacaccatggtataaagtgggcatttaatatgtaaagattcaaagtttgtctttattactatatgtaaattagacattaatccactaaactggtcttcttcaagagagctaagtatacactatctggtgaaacttggattctttcctataaaagtgggaccaagcaatgatgatcttctgtggtgcttaaggaaacttactagagctccactaacagtctcataaggaggcagccatcataaccattgaatagcatgcaagggtaagaatgagtttttaactgctttgtaagaaaatggaaaaggtcaataaagatatatttctttagaaaatggggatctgccatatttgtgttggtttttattttcatatccagcctaaaggtggttgtttattatatagtaataaatcattgctgtacaacatgctggtttctgtagggtatttttaattttgtcagaaattttagattgtgaatattttgtaaaaaacagtaagcaaaattttccagaattcccaaaatgaaccagataccccctagaaaattatactattgagaaatctatggggaggatatgagaaaataaattccttctaaaccacattggaactgacctgaagaagcaaactcggaaaatataataacatccctgaattcaggcattcacaagatgcagaacaaaatggataaaaggtatttcactggagaagttttaatttctaagtaaaatttaaatcctaacacttcactaatttataactaaaatttctcatcttcgtacttgatgctcacagaggaagaaaatgatgatggtttttattcctggcatccagagtgacagtgaacttaagcaaattaccctcctacccaattctatggaatattttatacgtctccttgtttaaaatctgactgctttactttgatgtatcatatttttaaataaaaataaatattcctttagaagatcactctaaaa

SEQ ID NO: 334 - protein, 493 aa, Homo sapiens
MLKALFLTMLTLALVKSQDTEETITYTQCTDGYEWDPVRQQCKDIDECDIVPDACKGGMKCVNHYGGYLCLPKTAQIIVNNEQPQQETQPAEGTSGATTGVVAASSMATSGVLPGGGFVASAAAVAGPEMQTGRNNFVIRRNPADPQRIPSNPSHRIQCAAGYEQSEHNVCQDIDECTAGTHNCRADQVCINLRGSFACQCPPGYQKRGEQCVDIDECTIPPYCHQRCVNTPGSFYCQCSPGFQLAANNYTCVDINECDASNQCAQQCYNILGSFICQCNQGYELSSDRLNCEDIDECRTSSYLCQYQCVNEPGKFSCMCPQGYQVVRSRTCQDINECETTNECREDEMCWNYHGGFRCYPRNPCQDPYILTPENRCVCPVSNAMCRELPQSIVYKYMSIRSDRSVPSDIFQIQATTIYANTINTFRIKSGNENGEFYLRQTSPVSAMLVLVKSLSGPREHIVDLEMLTVSSIGTFRTSSVLRLTIIVGPFSF

SEQ ID NO: 335 - DNA, 2675 bp, Homo sapiens
  CDS (152)..(1561)
aaaacattcaacaaattaatgggtgtaaggaactggaaaacctggactcctaccacatgcagataaaaccaatagagtgcagaataagactcaagtcaagtaagtaacgttaaacaccataaagacacatggccttctttgtgtacatgacatgcattctcaacaatgcactgacggatatgagtgggatcctgtgagacagcaatgcaaagatattgatgaatgtgacattgtcccagacgcttgtaaaggtggaatgaagtgtgtcaaccactatggaggatacctctgccttccgaaaacagcccagattattgtcaataatgaacagcctcagcaggaaacacaaccagcagaaggaacctcaggggcaaccaccggggttgtagctgccagcagcatggcaaccagtggagtgttgcccgggggtggttttgtggccagtgctgctgcagtcgcaggccctgaaatgcagactggccgaaataactttgtcatccggcggaacccagctgaccctcagcgcattccctccaacccttcccaccgtatccagtgtgcagcaggctacgagcaaagtgaacacaacgtgtgccaagacatagacgagtgcactgcagggacgcacaactgtagagcagaccaagtgtgcatcaatttacggggatcctttgcatgtcagtgccctcctggatatcagaagcgaggggagcagtgcgtagacatagatgaatgtaccatccctccatattgccaccaaagatgcgtgaatacaccaggctcattttattgccagtgcagtcctgggtttcaattggcagcaaacaactatacctgcgtagatataaatgaatgtgatgccagcaatcaatgtgctcagcagtgctacaacattcttggttcattcatctgtcagtgcaatcaaggatatgagctaagcagtgacaggctcaactgtgaagacattgatgaatgcagaacctcaagctacctgtgtcaatatcaatgtgtcaatgaacctgggaaattctcatgtatgtgcccccagggataccaagtggtgagaagtagaacatgtcaagatataaatgagtgtgagaccacaaatgaatgccgggaggatgaaatgtgttggaattatcatggcggcttccgttgttatccacgaaatccttgtcaagatccctacattctaacaccagagaaccgatgtgtttgcccagtctcaaatgccatgtgccgagaactgccccagtcaatagtctacaaatacatgagcatccgatctgataggtctgtgccatcagacatcttccagatacaggccacaactatttatgccaacaccatcaatacttttcggattaaatctggaaatgaaaatggagagttctacctacgacaaacaagtcctgtaagtgcaatgcttgtgctcgtgaagtcattatcaggaccaagagaacatatcgtggacctggagatgctgacagtcagcagtatagggaccttccgcacaagctctgtgttaagattgacaataatagtggggccattttcattttagtcttttctaagagtcaaccacaggcatttaagtcagccaaagaatattgttaccttaaagcactattttatttatagatatatctagtgcatctacatctctatactgtacactcacccataacaaacaattacaccatggtataaagtgggcatttaatatgtaaagattcaaagtttgtctttattactatatgtaaattagacattaatccactaaactggtcttcttcaagagagctaagtatacactatctggtgaaacttggattctttcctataaaagtgggaccaagcaatgatgatcttctgtggtgcttaaggaaacttactagagctccactaacagtctcataaggaggcagccatcataaccattgaatagcatgcaagggtaagaatgagtttttaactgctttgtaagaaaatggaaaaggtcaataaagatatatttctttagaaaatggggatctgccatatttgtgttggtttttattttcatatccagcctaaaggtggttgtttattatatagtaataaatcattgctgtacaacatgctggtttctgtagggtatttttaattttgtcagaaattttagattgtgaatattttgtaaaaaacagtaagcaaaattttccagaattcccaaaatgaaccagataccccctagaaaattatactattgagaaatctatggggaggatatgagaaaataaattccttctaaaccacattggaactgacctgaagaagcaaactcggaaaatataataacatccctgaattcaggcattcacaagatgcagaacaaaatggataaaaggtatttcactggagaagttttaatttctaagtaaaatttaaatcctaacacttcactaatttataactaaaatttctcatcttcgtacttgatgctcacagaggaagaaaatgatgatggtttttattcctggcatccagagtgacagtgaacttaagcaaattaccctcctacccaattctatggaatattttatacgtctccttgtttaaaatctgactgctttactttgatgtatcatatttttaaataaaaataaatattcctttagaagatcactctaaaa

SEQ ID NO: 336 - protein, 470 aa, Homo sapiens
MHSQQCTDGYEWDPVRQQCKDIDECDIVPDACKGGMKCVNHYGGYLCLPKTAQIIVNNEQPQQETQPAEGTSGATTGVVAASSMATSGVLPGGGFVASAAAVAGPEMQTGRNNFVIRRNPADPQRIPSNPSHRIQCAAGYEQSEHNVCQDIDECTAGTHNCRADQVCINLRGSFACQCPPGYQKRGEQCVDIDECTIPPYCHQRCVNTPGSFYCQCSPGFQLAANNYTCVDINECDASNQCAQQCYNILGSFICQCNQGYELSSDRLNCEDIDECRTSSYLCQYQCVNEPGKFSCMCPQGYQVVRSRTCQDINECETTNECREDEMCWNYHGGFRCYPRNPCQDPYILTPENRCVCPVSNAMCRELPQSIVYKYMSIRSDRSVPSDIFQIQATTIYANTINTFRIKSGNENGEFYLRQTSPVSAMLVLVKSLSGPREHIVDLEMLTVSSIGTFRTSSVLRLTIIVGPFSF

SEQ ID NO: 337 - DNA, 3496 bp, Homo sapiens
  CDS (1160)..(3013)
gaattctatggagtgtaattttgtgtatgaattatatttttaaaacattgaagagttttcagaaagaaggctagtagagttgattactgatactttatgctaagcagtacttttttggtagtacaatattttgttaggcgtttctgataacactagaaaggacaagttttatcttgtgataaattgattaatgtttacaacatgactgataattatagctgaatagtccttaaatgatgaacaggttatttagtttttaaatgcagtgtaaaaagtgtgctgtggaaattttatggctaactaagtttatggagaaaataccttcagttgatcaagaataatagtggtatacaaagttaggaagaaagtcaacatgatgctgcaggaaatggaaacaaatacaaatgatatttaacaaagatagagtttacagtttttgaactttaagccaaattcatttgacatcaagcactatagcaggcacaggttcaacaaagcttgtgggtattgacttcccccaaaagttgtcagctgaagtaatttagcccacttaagtaaatactatgatgataagctgtgtgaacttagcttttaaatagtgtgaccatatgaaggttttaattacttttgtttattggaataaaatgagattttttgggttgtcatgttaaagtgcttatagggaaagaagcctgcatataattttttaccttgtggcataatcagtaattggtctgttattcaggcttcatagcttgtaaccaaatataaataaaaggcataatttaggtattctatagttgcttagaattttgttaatataaatctctgtgaaaaatcaaggagttttaatattttcagaagtgcatccacctttcagggctttaagttagtattactcaagattatgaacaaatagcacttaggttacctgaaagagttactacaaccccaaagagttgtgttctaagtagtatcttggaaattcagagagatactcatcctacctgaatataaactgagataaatccagtaaagaaagtgtagtaaattctacataagagtctatcattgatttcttttggtggtaaaaatcttagttcatgtgaagaaatttcatgtgaatgttttagctatcaaacagcactgtcacctactcatgcacaaaactgcctcccaaagacttttcccaggtccctcgtatcaaaacattaagagtataatggaagatagcacgatcttgtcagattggacaaacagcaacaaacaaaaaatgaagtatgacttttcctgtgaactctacagaatgtctacatattcaactttccccgccggggtgcctgtctcagaaaggagtcttgctcgtgctggtttttattatactggtgtgaatgacaaggtcaaatgcttctgttgtggcctgatgctggataactggaaactaggagacagtcctattcaaaagcataaacagctatatcctagctgtagctttattcagaatctggtttcagctagtctgggatccacctctaagaatacgtctccaatgagaaacagttttgcacattcattatctcccaccttggaacatagtagcttgttcagtggttcttactccagcctttctccaaaccctcttaattctagagcagttgaagacatctcttcatcgaggactaacccctacagttatgcaatgagtactgaagaagccagatttcttacctaccatatgtggccattaacttttttgtcaccatcagaattggcaagagctggtttttattatataggacctggagatagggtagcctgctttgcctgtggtgggaagctcagtaactgggaaccaaaggatgatgctatgtcagaacaccggaggcattttcccaactgtccatttttggaaaattctctagaaactctgaggtttagcatttcaaatctgagcatgcagacacatgcagctcgaatgagaacatttatgtactggccatctagtgttccagttcagcctgagcagcttgcaagtgctggtttttattatgtgggtcgcaatgatgatgtcaaatgcttttgttgtgatggtggcttgaggtgttgggaatctggagatgatccatgggtagaacatgccaagtggtttccaaggtgtgagttcttgatacgaatgaaaggccaagagtttgttgatgagattcaaggtagatatcctcatcttcttgaacagctgttgtcaacttcagataccactggagaagaaaatgctgacccaccaattattcattttggacctggagaaagttcttcagaagatgctgtcatgatgaatacacctgtggttaaatctgccttggaaatgggctttaatagagacctggtgaaacaaacagttcaaagtaaaatcctgacaactggagagaactataaaacagttaatgatattgtgtcagcacttctaaatgctgaagatgaaaaaagagaggaggagaaggaaaaacaagctgaagaaatggcatcagatgatttgtcattaattcggaagaacagaatggctctctttcaacaattgacatgtgtgcttcctatcctggataatcttttaaaggccaatgtaattaataaacaggaacatgatattattaaacaaaaaacacagatacctttacaagcgagagaactgattgataccattttggttaaaggaaatgctgcggccaacatcttcaaaaactgtctaaaagaaattgactctacattgtataagaacttatttgtggataagaatatgaagtatattccaacagaagatgtttcaggtctgtcactggaagaacaattgaggaggttgcaagaagaacgaacttgtaaagtgtgtatggacaaagaagtttctgttgtatttattccttgtggtcatctggtagtatgccaggaatgtgccccttctctaagaaaatgccctatttgcaggggtataatcaagggtactgttcgtacatttctctcttaaagaaaaatagtctatattttaacctgcataaaaaggtctttaaaatattgttgaacacttgaagccatctaaagtaaaaagggaattatgagtttttcaattagtaacattcatgttctagtctgctttggtactaataatcttgtttctgaaaagatggtatcatatatttaatcttaatctgtttatttacaagggaagatttatgtttggtgaactatattagtatgtatgtgtacctaagggagtagtgtcactgcttgttatgcatcatttcaggagttactggatttgttgttctttcagaaagctttgaatactaaattatagtgtagaaaagaactggaaaccaggaactctggagttcatcagagttatggtgccgaattgtctttggtgcttttcacttgtgttttaaaataaggatttttctcttatttctccccctagtttgtgagaaacatctcaataaagtgcttt

SEQ ID NO: 338 - protein, 618 aa, Homo sapiens
MHKTASQRLFPGPSYQNIKSIMEDSTILSDWTNSNKQKMKYDFSCELYRMSTYSTFPAGVPVSERSLARAGFYYTGVNDKVKCFCCGLMLDNWKLGDSPIQKHKQLYPSCSFIQNLVSASLGSTSKNTSPMRNSFAHSLSPTLEHSSLFSGSYSSLSPNPLNSRAVEDISSSRTNPYSYAMSTEEARFLTYHMWPLTFLSPSELARAGFYYIGPGDRVACFACGGKLSNWEPKDDAMSEHRRHFPNCPFLENSLETLRFSISNLSMQTHAARMRTFMYWPSSVPVQPEQLASAGFYYVGRNDDVKCFCCDGGLRCWESGDDPWVEHAKWFPRCEFLIRMKGQEFVDEIQGRYPHLLEQLLSTSDTTGEENADPPIIHFGPGESSSEDAVMMNTPVVKSALEMGFNRDLVKQTVQSKILTTGENYKTVNDIVSALLNAEDEKREEEKEKQAEEMASDDLSLIRKNRMALFQQLTCVLPILDNLLKANVINKQEHDIIKQKTQIPLQARELIDTILVKGNAAANIFKNCLKEIDSTLYKNLFVDKNMKYIPTEDVSGLSLEEQLRRLQEERTCKVCMDKEVSVVFIPCGHLVVCQECAPSLRKCPICRGIIKGTVRTFLS

SEQ ID NO: 339 - DNA, 635 bp, Homo sapiens
  CDS (17)..(631)
catcaggtaagccaagatgggtgcatacaagtacatccaggagctatggagaaagaagcagtctgatgtcatgcgctttcttctgagggtccgctgctggcagtaccgccagctctctgctctccacagggctccccgccccacccggcctgataaagcgcgccgactgggctacaaggccaagcaaggttacgttatatataggattcgtgttcgccgtggtggccgaaaacgcccagttcctaagggtgcaacttacggcaagcctgtccatcatggtgttaaccagctaaagtttgctcgaagccttcagtccgttgcagaggagcgagctggacgccactgtggggctctgagagtcctgaattcttactgggttggtgaagattccacatacaaagcttttgaggttatcctcattgatccattccataaagctatcagaagaaatcctgacacccagtggatcaccaaaccagaccacaagcacagggagatgcgtgggctgacatctgcaggccgaaagagccgtggccttggaaagggccacaagttccaccacactattggtggctctcgccgggcagcttggagaaggcgcaatactccagctccaccgttaccgctaatataag

SEQ ID NO: 340 - protein, 205 aa, Homo sapiens
MGAYKYIQELWRKKQSDVMRFLLRVRCWQYRQLSALHRAPRPTRPDKARRLGYKAKQGYVIYRIRVRRGGRKRPVPKGATYGKPVHHGVNQLKFARSLQSVAEERAGRHCGALRVLNSYWVGEDSTYKAFEVILIDPFHKAIRRNPDTQWITKPDHKHREMRGLTSAGRKSRGLGKGHKFHHTIGGSRRAAWRRRNTPAPPLPLI

SEQ ID NO: 341 - DNA, 1406 bp, Homo sapiens
  CDS (177)..(1049)
ttttcctccctcccttacgtccccgagtgcggcagtaccgcctccttcccagccgcgcggcttcctccaracctctcggcgcgggtgagccctattcccagaggcaggtggtgctgaccctgtaacccaaaggaggaaacagctggctaagctcatcattgttactggtgggcaccatgtccttgaagcttcaggcaagcaatgtaaccaacaagaatgaccccaagtccatcaactctcgagtcttcattggaaacctcaacacagctctggtgaagaaatcagatgtggagaccatcttctctaagtatggccgtgtggccggctgttctgtgcacaagggctatgcctttgttcagtactccaatgagcgccatgcccgggcagctgtgctgggagagaatgggcgggtgctggccgggcagaccctggacatcaacatggctggagagcctaagcctgacagacccaaggggctaaagagagcagcatctgccatatacaggctcttcgactaccggggccgtctgtcgcccgtgccagtgcccagggcggtccctgtgaagcgaccccgggtcacagtccctttggtccggcgtgtcaaaactaacgtacctgtcaagctctttgcccgctccacagctgtcaccaccagctcagccaagatcaagttaaagagcagtgagctgcaggccatcaagacggagctgacacagatcaagtccaatatcgatgccctgctgagccgcttggagcagatcgctgcggacgaaaaggccaatccagatggcaagaagaagggtgatggaggtggtgccagcggcggcggcggcggtggtggtggcagcggtggcggtggcagtggtggtggcggtggcggtggcagcagccggccaccagccccccaagagaacacaacttctgaggcaggcctgccccagggggaagcacggacccgagacgacggcgatgaggaagggctcctgacacacagcgaggaagagctggaacacagccaggacacagacgcggatgatggggccttgcagtaagcagcctgacaggagcaatggccaccagcaggtgaagggcatcgctgccccaggcctcaagccgggcacccaaccctggatgccaccccccagcgggtaccagaggaaagctggcagcaggcgcctcctcccccaacgcatcccagccagtgccatgtcctctgcaggtggagttactggcctactccttccccatgagccctccctgtctgcactgcccaggccagagggtagagcacaggggtttccccatactacctcccctccccaggacactcccaggcttgggttttttctataggtttggcggggggccacagggaggggaccctgacaataaagagattggatccc

SEQ ID NO: 342 - protein, 291 aa, Homo sapiens [sequence omitted]

SEQ ID NO: 343 - DNA, 1573 bp, Homo sapiens
  CDS (299)..(1216)
cgcgcgagcggcgccagctcggggcagcggaacccagagaagctgagggggcggtagcggcggcgacggcgacgacgacgactcccgcgcgtgtgcccagcctcttcccgccgcagccgcccttttcctccctcccttacgtccccgagtgcggcagtaccgcctccttcccagccgcgcggcttcctccagacctctcggcgcgggtgagccctattcccagaggcaggtggtgctgaccctgtaacccaaaggaggaaacagctggctaagctcatcattgttactggtgggcaccatgtccttgaagcttcaggcaagcaatgtaaccaacaagaatgaccccaagtccatcaactctcgagtcttcattggaaacctcaacacagctctggtgaagaaatcagatgtggagaccatcttctctaagtatggccgtgtggccggctgttctgtgcacaagggctatgcctttgttcagtactccaatgagcgccatgcccgggcagctgtgctgggagagaatgggcgggtgctggccgggcagaccctggacatcaacatggctggagagcctaagcctgacagacccaaggggctaaagagagcagcatctgccatatacagtggctacatctttgactatgattactaccgggacgacttctacgacaggctcttcgactaccggggccgtctgtcgcccgtgccagtgcccagggcggtccctgtgaagcgaccccgggtcacagtccctttggtccggcgtgtcaaaactaacgtacctgtcaagctctttgcccgctccacagctgtcaccaccagctcagccaagatcaagttaaagagcagtgagctgcaggccatcaagacggagctgacacagatcaagtccaatatcgatgccctgctgagccgcttggagcagatcgctgcggagcaaaaggccaatccagatggcaagaagaagggtgatggaggtggcgccggcggcggcggcggtggtggtggcagcggtggcggtggcagtggtggtggcggtggcggtggcagcagccggccaccagccccccaagagaacacaacttctgaggcaggcctgccccagggggaagcacggacccgagacgacggcgatgaggaagggctcctgacacacagcgaggaagagctggaacacagccaggacacagacgcggatgatggggccttgcagtaagcagcctgacaggagcaatggccaccagcaggtgaagggcatcgctgccccaggcctcaagccgggcacccaaccctggatgccaccccccagcgggtaccagaggaaagctggcagcaggcgcctcctcccccaacgcatcccagccagtgccatgtcctctgcaggtggagttactggcctactccttccccatgagccctccctgtctgcactgcccaggccagagggtagagcacaggggtttccccatactacctcccctccccaggacactcccaggcttgggttttttctataggtttggcggggggccacagggaggggaccctgacaataaagagattggatccc

SEQ ID NO: 344 - protein, 306 aa, Homo sapiens
MSLKLQASNVTNKNDPKSINSRVFIGNLNTALVKKSDVETIFSKYGRVAGCSVHKGYAFVQYSNERHARAAVLGENGRVLAGQTLDINMAGEPKPDRPKGLKRAASAIYSGYIFDYDYYRDDFYDRLFDYRGRLSPVPVPRAVPVKRPRVTVPLVRRVKTNVPVKLFARSTAVTTSSAKIKLKSSELQAIKTELTQIKSNIDALLSRLEQIAAEQKANPDGKKKGDGGGAGGGGGGGGSGGGGSGGGGGGGSSRPPAPQENTTSEAGLPQGEARTRDDGDEEGLLTHSEEELEHSQDTDADDGALQ

SEQ ID NO: 345 - DNA, 914 bp, Homo sapiens
  CDS (19)..(768)
ccagccaacgagcggaaaatggcagacaatttttcgctccatgatgcgttatctgggtctggaaacccaaaccctcaaggatggcctggcgcatgggggaaccagcctgctggggcagggggctacccaggggcttcctatcctggggcctaccccgggcaggcacccccaggggcttatcctggacaggcacctccaggcgcctaccatggagcacctggagcttatcccggagcacctgcacctggagtctacccagggccacccagcggccctggggcctacccatcttctggacagccaagtgcccccggagcctaccctgccactggcccctatggcgcccctgctgggccactgattgtgccttataacctgcctttgcctgggggagtggtgcctcgcatgctgataacaattctgggcacggtgaagcccaatgcaaacagaattgctttagatttccaaagagggaatgatgttgccttccactttaacccacgcttcaatgagaacaacaggagagtcattgtttgcaatacaaagctggataataactggggaagggaagaaagacagtcggttttcccatttgaaagtgggaaaccattcaaaatacaagtactggttgaacctgaccacttcaaggttgcagtgaatgatgctcacttgttgcagtacaatcatcgggttaaaaaactcaatgaaatcagcaaactgggaatttctggtgacatagacctcaccagtgcttcatataccatgatataatctgaaaggggcagattaaaaaaaaaaaaaaagaatctaaaccttacatgtgtaaaggtttcatgttcactgtgagtgaaaatttttacattcatcaatatccctcttgtaagtcatctacttaataaatattacagtgaaag

SEQ ID NO: 346 - protein, 250 aa, Homo sapiens
MADNFSLHDALSGSGNPNPQGWPGAWGNQPAGAGGYPGASYPGAYPGQAPPGAYPGQAPPGAYHGAPGAYPGAPAPGVYPGPPSGPGAYPSSGQPSAPGAYPATGPYGAPAGPLIVPYNLPLPGGVVPRMLITILGTVKPNANRIALDFQRGNDVAFHFNPRFNENNRRVIVCNTKLDNNWGREERQSVFPFESGKPFKIQVLVEPDHFKVAVNDAHLLQYNHRVKKLNEISKLGISGDIDLTSASYTMI

SEQ ID NO: 347 - DNA, 1351 bp, Homo sapiens
  CDS (20)..(736)
ggcgtccgcgcgctgcacaatggcggctctgaagagttggctgtcgcgcagcgtaacttcattcttcaggtacagacagtgtttgtgtgttcctgttgtggctaactttaagaagcggtgtttctcagaattgataagaccatggcacaaaactgtgacgattggctttggagtaaccctgtgtgcggttcctattgcacagaaatcagagcctcattcccttagtagtgaagcattgatgaggagagcagtgtctttggtaacagatagcacctctacctttctctctcagaccacatatgcgttgattgaagctattactgaatatactaaggctgtttataccttaacttctctttaccgacaatatacaagtttacttgggaaaatgaattcagaggaggaagatgaagtgtggcaggtgatcataggagccagagctgagatgacttcaaaacaccaagagtacttgaagctggaaaccacttggatgactgcagttggtctttcagagatggcagcagaagctgcatatcaaactggcgcagatcaggcctctataaccgccaggaatcacattcagctggtgaaactgcaggtggaagaggtgcaccagctctcccggaaagcagaaaccaagctggcagaagcacagatagaagagctccgtcagaaaacacaggaggaaggggaggagcgggctgagtcggagcaggaggcctacctgcgtgaggattgagggcctgagcacactgccctgtctccccactcagtggggaaagcaggggcagatgccaccctgcccagggttggcatgactgtctgtgcaccgagaagaggcggcaggtcctgccctggccaatcaggcgagacgcctttgtgagctgtgagtgcctcctgtggtctcaggcttgcgctggacctggttcttagcccttgggcactgcaccctgtttaacatttcaccccactctgtacagctgctcttacccattttttttacctcacacccaaagcattttgcctacctgggtcagagagaggagtcctttttgtcatgcccttaagttcagcaactgtttaacctgttttcagtcttatttacgtcgtcaaaaatgatttagtacttgttccctctgttgggatgccagttgtggcagggggaggggaacctgtccagtttgtacgatttctttgtatgtatttctgatgtgttctctgatctgcccccactgtcctgtgaggacagctgaggccaaggagtgaaaaacctattactactaagagaaggggtgcagagtgtttacctggtgctctcaacaggacttaacatcaacaggacttaacacag

SEQ ID NO: 348 - protein, 239 aa, Homo sapiens
MAALKSWLSRSVTSFFRYRQCLCVPVVANFKKRCFSELIRPWHKTVTIGFGVTLCAVPIAQKSEPHSLSSEALMRRAVSLVTDSTSTFLSQTTYALIEAITEYTKAVYTLTSLYRQYTSLLGKMNSEEEDEVWQVIIGARAEMTSKHQEYLKLETTWMTAVGLSEMAAEAAYQTGADQASITARNHIQLVKLQVEEVHQLSRKAETKLAEAQIEELRQKTQEEGEERAESEQEAYLRED

SEQ ID NO: 349 - DNA, 830 bp, Homo sapiens
  CDS (95)..(610)
cccccccgagcgccgctccggctgcaccgcgctcgctccgagtttcaggctcgtgctaagctagcgccgtcgtcgtctcccttcagtcgccatcatgattatctaccgggacctcatcagccacgatgagatgttctccgacatctacaagatccgggagatcgcggacgggttgtgcctggaggtggaggggaagatggtcagtaggacagaaggtaacattgatgactcgctcattggtggaaatgcctccgctgaaggccccgagggcgaaggtaccgaaagcacagtaatcactggtgtcgatattgtcatgaaccatcacctgcaggaaacaagtttcacaaaagaagcctacaagaagtacatcaaagattacatgaaatcaatcaaagggaaacttgaagaacagagaccagaaagagtaaaaccttttatgacaggggctgcagaacaaatcaagcacatccttgctaatttcaaaaactaccagttctttattggtgaaaacatgaatccagatggcatggttgctctattggactaccgtgaggatggtgtgaccccatatatgattttctttaaggatggtttagaaatggaaaaatgttaacaaatgtggcaattattttggatctatcacctgtcatcataactggcttctgcttgtcatccacacaacaccaggacttaagacaaatgggactgatgtcatcttgagctcttcatttattttgactgtgatttatttggagtggaggcattgtttttaagaaaaacatgtcatgtaggttgtctaaaaataaaatgcatttaaactcatttgagag

SEQ ID NO: 350 - protein, 172 aa, Homo sapiens
MIIYRDLISHDEMFSDIYKIREIADGLCLEVEGKMVSRTEGNIDDSLIGGNASAEGPEGEGTESTVITGVDIVMNHHLQETSFTKEAYKKYIKDYMKSIKGKLEEQRPERVKPFMTGAAEQIKHILANFKNYQFFIGENMNPDGMVALLDYREDGVTPYMIFFKDGLEMEKC

SEQ ID NO: 351 - DNA, 1931 bp, Homo sapiens
  CDS (93)..(1535)
attgccgctggtggcaggaggctgcgaggagccggcgcggtcgcagtctccacggcgcaggcccacggtagcgcagccgctctgagaacttcatggaggaacacggagtgacccaaaccgaacatatggctaccatagaagcacatgcagtggcccagcaagtgcagcaggtccatgtggctacttacaccgagcatagtatgctgagtgctgatgaagactcgccttcttctcccgaggacacctcttacgatgactcagatatactcaactccacagcagctgatgaggtgacagctcatctggcagctgcaggtcctgtgggaatggccgctgctgctgctgtggcaacaggaaagaaacggaaacggcctcatgtatttgagtctaatccatctatccggaagaggcaacaaacacgtttgcttcggaaacttcgagccacgttagatgaatatactactcgtgtgggacagcaagctattgtcctctgtatctcaccctccaaacctaaccctgtctttaaagtgtttggtgcagcacctttggagaatgtggtgcgtaagtacaagagcatgatcctggaagacctggagtctgctctggcagaacacgcccctgcgccacaggaggttaactcagaactgccgcctctcaccatcgacggaattccagtctctgtggacaaaatgacccaggcccagcttcgggcatttatcccagagatgctcaagtactctacaggtcggggaaaaccaggctgggggaaagaaagctgcaagcccatctggtggcctgaagatatcccctgggcaaatgtccggagtgatgtccgcacagaagagcaaaagcagagggtttcatggacccaggcactacggaccatagttaaaaactgttataaacagcatgggcgggaagaccttttgtatgcctttgaagatcagcaaacgcaaacacaggccacagccacacatagtatagctcatcttgtaccatcacagactgtagtccagacttttagtaaccctgatggcactgtctcacttatccaggttggtacgggggcaacagtagccacattggctgatgcttcagaattgccaaccacggtcaccgttgcccaagtgaattattctgccgtggctgatggagaggtggaacaaaattgggccacgttacagggaggtgagatgaccatccagacgacgcaagcatcagaggccacccaggcggtggcatcgttggcagaggccgcagtggcagcttctcaggagatgcagcagggagctacagtcactatggcgcttaacagcgaagctgccgcccatgctgtcgccaccctggctgaggccaccttacaaggtgggggacagatcgtcttgtctggggaaaccgcagcagccgtcggagcacttactggagtccaagatgctaatgctcctcaccgggtcttccacttggctctgcctacagcccttgcttggggtcccccagagattttgaagagcacatctgtctccgctggtcagcactgaagactcagaaaccacctatgctgccctggttaagactagggtctcaaccctccctcctcatgttctgaatgaagagaaatggactggagggctgtttaaaaattaaagctgctgggtgcggtggctcacgcctgtaatcccagcactttgggatgccgacgcgggcggatcacaaggtcaggagttcgagaccagcctggccaatatggtgaaaccctgtctctactaaaaatataaaatttagccgggcgtggtggcacacgcctgtagtcccagctacttgggaggctgaggcaggagaatcgcttgaacccgggaggcagaggttgcggtgagccaagattgtgccactgcactccagccaggctgacagagtgagacttcctagtaaat

SEQ ID NO: 352 - protein, 481 aa, Homo sapiens
MEEHGVTQTEHMATIEAHAVAQQVQQVHVATYTEHSMLSADEDSPSSPEDTSYDDSDILNSTAADEVTAHLAAAGPVGMAAAAAVATGKKRKRPHVFESNPSIRKRQQTRLLRKLRATLDEYTTRVGQQAIVLCISPSKPNPVFKVFGAAPLENVVRKYKSMILEDLESALAEHAPAPQEVNSELPPLTIDGIPVSVDKMTQAQLRAFIPEMLKYSTGRGKPGWGKESCKPIWWPEDIPWANVRSDVRTEEQKQRVSWTQALRTIVKNCYKQHGREDLLYAFEDQQTQTQATATHSIAHLVPSQTVVQTFSNPDGTVSLIQVGTGATVATLADASELPTTVTVAQVNYSAVADGEVEQNWATLQGGEMTIQTTQASEATQAVASLAEAAVAASQEMQQGATVTMALNSEAAAHAVATLAEATLQGGGQIVLSGETAAAVGALTGVQDANAPHRVFHLALPTALAWGPPEILKSTSVSAGQH

SEQ ID NO: 353 - DNA, 1960 bp, Homo sapiens
  CDS (147)..(1697)
ataatgatgatgacgatgatgatgatggagacgatcctgaagaaagagaagaaaagcagaaagatctggaggatcaccgagatgataaagaaagccgcccacctcggaaatttccttctgataaaatttttgaagccatttcctcaatgtttccagataagggcacagcagaagaactaaaggaaaaatataaagaactcaccgaacagcagctcccaggcgcacttcctcctgaatgtacccccaacatagatggaccaaatgctaaatctgttcagagagagcaaagcttacactcctttcatacgcttttctgtaggcgatgttttaaatatgactgcttcctacatccttttcatgcaacacccaacacttataagcggaagaacacagaaacagctctagacaacaaaccttgtggaccacagtgttaccagcatttggagggagcaaaggagtttgctgctgctctcaccgctgagcggataaagaccccaccaaaacgtccaggaggccgcagaagaggacggcttcccaataacagtagcaggcccagcacccccaccattaatgtgctggaatcaaaggatacagacagtgatagggaagcagggactgaaacggggggagagaacaatgataaagaagaagaagagaagaaagatgaaacttcgagctcctctgaagcaaattctcggtgtcaaacaccaataaagatgaagccaaatattgaacctcctgagaatgtggagtggagtggtgctgaagcctcaatgtttagagtcctcattggcacttactatgacaatttctgtgccattgctaggttaattgggaccaaaacatgtagacaggtgtatgagtttagagtcaaagaatctagcatcatagctccagctcccgctgaggatgtggatactcctccaaggaaaaagaagaggaaacaccggttgtgggctgcacactgcagaaagatacagctgaaaaaggacggctcctctaaccatgtttacaactatcaaccctgtgatcatccacggcagccttgtgacagttcgtgcccttgtgtgatagcacaaaatttttgtgaaaagttttgtcaatgtagttcagagtgtcaaaaccgctttccgggatgccgctgcaaagcacagtgcaacaccaagcagtgcccgtgctacctggctgtccgagagtgtgaccctgacctctgtcttacttgtggagccgctgaccattgggacagtaaaaatgtgtcctgcaagaactgcagtattcagcggggctccaaaaagcatctattgctggcaccatctgacgtggcaggctgggggatttttatcaaagatcctgtgcagaaaaatgaattcatctcagaatactgtggagagattatttctcaagatgaagctgacagaagagggaaagtgtatgataaatacatgtgcagctttctgttcaacttgaacaatgattttgtggtggatgcaacccgcaagggtaacaaaattcgttttgcaaatcattcggtaaatccaaactgctatgcaaaagttatgatggttaacggtgatcacaggataggtatttttgccaagagagccatccagactggcgaagagctgttttttgattacagatacagccaggctgatgccctgaagtatgtcggcatcgaaagagaaatggaaatcccttgacatctgctacctcctccccctcctctgaaacagctgccttagcttcaggaacctcgagtactgtgggcaatttagaaaaagaacatgcagtttgaaattctgaatttgcaaagtactgtaagaataatttatagtaatgagtttaaaaatcaactttttattgccttctcaccagctgcaaagtgttttgtaccagtgaatttttgcaataatgcagtatggtacatttttcaactttgaataaagaatacttgaacttg

SEQ ID NO: 354 - protein, 517 aa, Homo sapiens
MFPDKGTAEELKEKYKELTEQQLPGALPPECTPNIDGPNAKSVQREQSLHSFHTLFCRRCFKYDCFLHPFHATPNTYKRKNTETALDNKPCGPQCYQHLEGAKEFAAALTAERIKTPPKRPGGRRRGRLPNNSSRPSTPTINVLESKDTDSDREAGTETGGENNDKEEEEKKDETSSSSEANSRCQTPIKMKPNIEPPENVEWSGAEASMFRVLIGTYYDNFCAIARLIGTKTCRQVYEFRVKESSIIAPAPAEDVDTPPRKKKRKHRLWAAHCRKIQLKKDGSSNHVYNYQPCDHPRQPCDSSCPCVIAQNFCEKFCQCSSECQNRFPGCRCKAQCNTKQCPCYLAVRECDPDLCLTCGAADHWDSKNVSCKNCSIQRGSKKHLLLAPSDVAGWGIFIKDPVQKNEFISEYCGEIISQDEADRRGKVYDKYMCSFLFNLNNDFVVDATRKGNKIRFANHSVNPNCYAKVMMVNGDHRIGIFAKRAIQTGEELFFDYRYSQADALKYVGIEREMEIP

SEQ ID NO: 355 - DNA, 2468 bp, Homo sapiens
  CDS (136)..(1773)
aagcccggcctggcggcggcggtggcggtagctgccgtggcggcctctgcgcatgctccgtcgcctgcccgccctggccgctcgccgcccgcccgcccgacggagacgtcccagctatctgacttcatgtgaaagatggctaatgcagaagtgagtgtcccagtgggggatgtggttgtggtacctactgaaggaaatgaaggggagaatcctgaagacactaaaacccaagtgattttgcagttacagcctgtgcaacaagggatttatgaagctgggtcggagaacaacacggcagttgtagcagtagaagcaaatgaggatatggaaattgcttaccccataacttgtggggagagcaaagccatcctcctctggaagaagtttgtatgtccaggaataaacgtgaagtgtgtcaagttcaatgatcagttgatcagccccaagcactttgttcatctggctggcaagtccactctgaaggactggaagagagctattcgtctgggtgggatcatgctcaggaaaatgatggactccggacagattgatttttaccaacatgacaaagtttgctccaatacctgcagaagcaccaaatttgatcttctgatcagcagtgcaagagctccagtgccaggacagcagacaagtgtggtgcagacacccacttcggctgatggtagcatcacgcagattgccatctcagaagagagcatggaagaggcagggctggaatggaactcagctctcaccgctgctgtcaccatggccacggaggagggtgtaaagaaagactcagaggaaatttcagaggacactttgatgttctggaaaggaatagctgatgtagggctgatggaagaggttgtctgcaatatacagaaggaaatagaggagctactcaggggagttcagcagcggctcatccaggctcccttccaagtcacagatgctgctgttctcaacaatgtagcacacacatttggcctaatggacacagtcaagaaggttttagacaacagaaggaaccaagtagagcagggagaagaacagtttctctatactctgacagacttggaacgccagttggaggagcagaagaagcaaggccaggatcacaggctgaaatctcagacagttcaaaatgtggtactgatgcctgtgagcactcctaagcctccaaaaaggccccggctccagcggccagcctccaccactgtcttgagcccttctcctcctgtccagcagcctcagttcacagtcatctcacccatcaccatcaccccagtgggtcagtcattttccatgggcaatattccagtggccaccctcagccagggctccagtcctgtgactgtccacacactgccttctggccctcagctcttccgctatgccacagtggtctcctctgccaagagcagctcaccagacacagtgaccatccacccttcatctagcttggcgctgctgagctctactgccatgcaggatgggagtacactgggcaacatgaccaccatggttagccctgtggaattggtggccatggagtccggcctaacctcggcaattcaggctgttgaaagcacctcagaggatgggcagaccatcattgagattgatccagccccggacccagaagctgaagatactgagggcaaagcagtcatcttggagacagagctgaggactgaggagaaagttgtggctgagatggaagaacaccagcatcaagttcacaatgtggagattgtggtcttagaggattaactggggatctcagggccaggagttatgttttgatttggaattttaattatttgtttatttttatcattgtcccactcatttccacataggacccttttttaaaaaaaaaaaaacaaaatcttattgttgtaactgaaaatgttgggttcttcccactccctcattgaaaaatggacaaaacaagctgcccttccagaagttgagagtaggtcattcaatgtcctaatcatcttacaccaagaaagtaatttcttttaggggaagtgtcaagataacaagtaaccctgtccagaaagccatttccaggctcgtctgtgtgtgtaggcatgtggttttattcttgtaaagatgcattgaccaaactctggaacacagatctgacactggaaggcaacccactcgcatgtggatgctgaagggcactttattttgtatcctgaaaagggcctacagaggccagtacaaaactctcaaacaaaaggaagttgactctgctttgaggggaaggtggcatgccagcactagcttaaaaagggaagtgctagccgggtgtggtggcgggagcctgtaatcccagctattcaggaggccaaggcaggagaatcgcttgaacctgggaaggcggaggttgcagtgagccaagatcgcaccactgcactccagcctgggcaacaagagcgagactccatctc

SEQ ID NO: 356 - protein, 546 aa, Homo sapiens
MANAEVSVPVGDVVVVPTEGNEGENPEDTKTQVILQLQPVQQGIYEAGSENNTAVVAVEANEDMEIAYPITCGESKAILLWKKFVCPGINVKCVKFNDQLISPKHFVHLAGKSTLKDWKRAIRLGGIMLRKMMDSGQIDFYQHDKVCSNTCRSTKFDLLISSARAPVPGQQTSVVQTPTSADGSITQIAISEESMEEAGLEWNSALTAAVTMATEEGVKKDSEEISEDTLMFWKGIADVGLMEEVVCNIQKEIEELLRGVQQRLIQAPFQVTDAAVLNNVAHTFGLMDTVKKVLDNRRNQVEQGEEQFLYTLTDLERQLEEQKKQGQDHRLKSQTVQNVVLMPVSTPKPPKRPRLQRPASTTVLSPSPPVQQPQFTVISPITITPVGQSFSMGNIPVATLSQGSSPVTVHTLPSGPQLFRYATVVSSAKSSSPDTVTIHPSSSLALLSSTAMQDGSTLGNMTTMVSPVELVAMESGLTSAIQAVESTSEDGQTIIEIDPAPDPEAEDTEGKAVILETELRTEEKVVAEMEEHQHQVHNVEIVVLED

SEQ ID NO: 357 - DNA, 3296 bp, Homo sapiens
  CDS (781)..(1845)
attttgtatttaactgattctttttatgtatttgagtacatacattcataaattgagatcatattttagacatatagttctgttctttaaaaactaatgtattatgaacattttcctgtgctaacatcagttcttctaagccattttaatactttcaggataaaaatatcatcagatagctgtaccatgatttaataaaccgcatcccacaatgggttatttagattatatttggttgtttgctatttcacattttacatattttttatcatgtattagtttgataaagatagttatatcttgcttttttcatttatctagtactatcttcccataattgaccttcagaactgttatatatacaaatataatagtaatatgtagttatatagtataataagtgaaattaatgactatataattttacattacatgagtttacaacctaactgttcttctgggcattttgttcattttcatattttctgttttataattgcatggatagacatctttttgcataaagcttttccatttctgatgagtttctcaggaaagatgactggcattggagcacctaggctgacgaggatgtgcattgtttagagtaatgagataaatctgtgtatttcctttctgaaagacattgcagttcaccatcaccaacagtgaagagcttccgctgcatactgcgccttcatcactagcaagttcacgttcgcttttaccgtgtgttttattctctttctctctaagttatttggcaacatctggttatccatggccagcctggtcatctttatgcagctgcgttacctgtttcatgaggtgcaacgtcgaattcgtcggcacaagaactatctacgtgtggttggaaacatggaggccaggtttgcagttgcaactccagaggagctggctgtcaacaatgacgactgtgccatctgttgggactccatgcaggctgcgcggaaactgccctgtggacatcttttccacaactcctgtcttcgttcctggctagaacaagacacctcctgtccaacatgcagaatgtctcttaatattgccgacaataatcgtgtcagggaagaacatcaaggagagaacttggatgagaatttggttcctgtagcagcagccgaagggagacctcgcttaaaccaacacaatcacttcttccatttcgatgggtctcggattgcgagctggctgccgagtttttcggttgaagtgatgcacaccaccaacattcttggcattacgcaggccagcaactcccagctcaatgcaatggctcatcagattcaagagatgtttccccaggttccataccatctggtactgcaggacctccagctgacacgctcagttgaaataacaacagacaatattttagaaggacggattcaagtaccttttcctacacagcggtcagatagcatcagacctgcattgaacagtcctgtggaaaggccaagcagtgaccaggaagagggagaaacttctgctcagaccgagcgtgtgccactggacctcagtcctcgcctggaggagacgctggacttcggcgaggtggaagtggagcccagtgaggtggaagacttcgaggctcgtgggagccgcttctccaagtctgctgatgagagacagcgcatgctggtgcagcgtaaggacgaactcctccagcaagctcgcaaacgtttcttgaacaaaagttctgaagatgatgcggcctcagagagcttcctcccctcggaaggtgcgtcctctgaccccgtgaccctgcgtcgaaggatgctggctgccgccgcggaacggaggcttcagaagcagcagacctcctagcgctcccttgccttcctcagctgcctcctgcgccctgtgcccgactgactggaggaggcctgtcccaattctgcccgctccatggaaaagcgggcttgactgcattgccgctgtataaagcatgtggtcttatagtgtttggacagctgataaatttaatccttctttgtaatactttctatgtgacatttctcttccccttagaaacactgcaaattttaactgtaggtatgatctcttctggtgttgactggactgcttggggtgggggacgatcaggaggaagtgagcagtcgcctgcctgcagcaggcagcttctactcctgcctcatgcatacgtcccacaaatgcaggtgtcctgagcaccacacccagtgggaagagtgtgggggaggcgcacagtgtgagcccgcccccacgtcgtggggtaacatctgttatcaaactgctgtcgttgttgtggaagcatgtagactgtgccagaggccagacccacgggctcatgcacccctgagccagcagggcatcttggaaaaggaactcttggttcgatacctggagcagaggaggggaaagtccagggctatagggtgtgatgaagtcacccctttctgtcccactacatctgggactgactttccgagcctccagtccaaagccggcttgatttccgtgaactctggtgctcctgcatctcatgagtgtgccccatgggtcccctcccctctcagcatttccttgtcccgtctggacctggggagtggttaggcagcaagctttggtttatggttttcattcattggtgaagtaaattaggcagtgctaaagcctgtgggtttggtccttgaacaagatgtgggccttgcaagatgggagagtaaaccttgaagggctttattaaagaaataaaaaagaacttttgtatcttttatcctgggagcactgcgttttcctagctgtgttattcctggtttaattcagcagagaaggtaaggtgtgaacctacctgccttggagagggcccaggtcccaaatctcttcaaattcttcacatgtttaactttaaggatttgaaccatgaagtcataggttacagacctcagttttatgccccattggattactttttttttttttttttttttttactctttgaaagctttgttttgtggtagtccttttgggaagaatccagtattatctacaattattggcaaagtttaaatgtattttacataacggaaagtttttagaatgttgaaaagtaattgaaaaaggtgataggtaaatttttaggcaaagataatttatttcaataaatctttcaaaagccttaccttgaaatgctgttagtaaatttctgtgatttttttttttaatttgttttgctgagagcatagctatttgtttttattgtaaaacaataataataataaaaagcaaactct

SEQ ID NO: 358 - protein, 355 aa, Homo sapiens [sequence omitted]

SEQ ID NO: 359 - DNA, 2898 bp, Homo sapiens
  CDS (66)..(1994)
gggccgccgcagaggcccggccgcagcgcagggaagcctgggggccagaggtcgccgctgccgccatgccgctgctcttcctcgagcgcttcccctggcccagcctccgcacctacacgggcctcagcggcctggccctgctgggcaccatcatcagcgcctaccgcgcgctcagccagcccgaggccggccccggcgagccggaccagctaacggcctcgctgcagcctgagccgccggcgcccgcccggccgagcgccgggggaccccgggcccgcgatgtggcccagtacctgctctcagacagcctcttcgtgtgggttctagtaaataccgcttgctgtgttttgatgttggtggctaagctcatccagtgtattgtgtttggccctcttcgagtgagtgagagacagcatctcaaagacaaattttggaattttattttctacaagttcattttcatctttggtgtgctgaatgtccagacagtggaagaggtggtcatgtggtgcctctggtttgccggacttgtctttctgcacctgatggttcagctctgcaaggatcgatttgaatatctttccttctcgcccaccacgccgatgagcagccacggtcgagtcctgtccctgttggttgccatgctgctttcctgctgtggactggcggccgtctgctccatcaccggctacacccacggaatgcacaccttggctttcatggctgcagagtctcttcttgtgacagtgaggactgctcatgtgattttacgatacgtaattcacctctgggacctcaaccacgaagggacgtgggaaggaaaggggacgtatgtctattacacagactttgtcatggagctcactctcctgtccctggacctcatgcaccatattcacatgttgttatttggcaacatctggttatccatggccagcctggtcatctttatgcagctgcgttacctgtttcatgaggtgcaacgtcgaattcgtcggcacaagaactatctacgtgtggttggaaacatggaggccaggtttgcagttgcaactccagaggagctggctgtcaacaatgacgactgtgccatctgttgggactccatgcaggctgcgcggaaactgccctgtggacatcttttccacaactcctgtcttcgttcctggctagaacaagacacctcctgtccaacatgcagaatgtctcttaatattgccgacaataatcgtgtcagggaagaacatcaaggagagaacttggatgagaatttggttcctgtagcagcagccgaagggagacctcgcttaaaccaacacaatcacttcttccatttcgatgggtctcggattgcgagctggctgccgagtttttcggttgaagtgatgcacaccaccaacattcttggcattacgcaggccagcaactcccagctcaatgcaatggctcatcagattcaagagatgtttccccaggttccataccatctggtactgcaggacctccagctgacacgctcagttgaaataacaacagacaatattttagaaggacggattcaagtaccttttcctacacagcggtcagatagcatcagacctgcattgaacagtcctgtggaaaggccaagcagtgaccaggaagagggagaaacttctgctcagaccgagcgtgtgccactggacctcagtcctcgcctggaggagacgctggacttcggcgaggtggaagtggagcccagtgaggtggaagacttcgaggctcgtgggagccgcttctccaagtctgctgatgagagacagcgcatgctggtgcagcgtaaggacgaactcctccagcaagctcgcaaacgtttcttgaacaaaagttctgaagatgatgcggcctcagagagcttcctcccctcggaaggtgcgtcctctgaccccgtgaccctgcgtcgaaggatgctggctgccgccgcggaacggaggcttcagaagcagcagacctcctagcgctcccttgccttcctcagctgcctcctgcgccctgtgcccgactgactggaggaggcctgtcccaattctgcccgctccatggaaaagcgggcttgactgcattgccgctgtataaagcatgtggtcttatagtgtttggacagctgataaatttaatccttctttgtaatactttctatgtgacatttctcttccccttagaaacactgcaaattttaactgtaggtatgatctcttctggtgttgactggactgcttggggtggggggcgatcaggaggaagtgagcagtcgcctgcctgcagcaggcagctttctactcctgcctcatgcatacgtcccacaaatgcaggtgtcctgagcaccacacccagtgggaagagtgtgggggaggcgcacagtgtgagcccgcccccacgtcgtggggtaacatctgttatcaaactgctgtcgttgttgtggaagcatgtagactgtgccagaggccagacccacgggctcatgcacccctgagccagcagggcatcttggaaaaggaactcttggttcgatacctggagcagaggaggggaaagtccagggctatagggtgtgatgaagtcacccctttctgtcccactacatctgggactgactttccgagcctccagtccaaagccggcttgatttccgtgaactctggtgctcctgcatctcatgagtgtgccccatgggtcccctcccctctcagcatttccttgtcccgtctggacctgggggagtggttaggcagcaagctttggtttatggttttcattcattggtgaagtaaattaggcagtgctaaagcctgtgggtttggtccttgaacaagatgtgggccttgcaagatgggagagtaaaccttgaagggctttatt

SEQ ID NO: 360 - protein, 643 aa, Homo sapiens
MPLLFLERFPWPSLRTYTGLSGLALLGTIISAYRALSQPEAGPGEPDQLTASLQPEPPAPARPSAGGPRARDVAQYLLSDSLFVWVLVNTACCVLMLVAKLIQCIVFGPLRVSERQHLKDKFWNFIFYKFIFIFGVLNVQTVEEVVMWCLWFAGLVFLHLMVQLCKDRFEYLSFSPTTPMSSHGRVLSLLVAMLLSCCGLAAVCSITGYTHGMHTLAFMAAESLLVTVRTAHVILRYVIHLWDLNHEGTWEGKGTYVYYTDFVMELTLLSLDLMHHIHMLLFGNIWLSMASLVIFMQLRYLFHEVQRRIRRHKNYLRVVGNMEARFAVATPEELAVNNDDCAICWDSMQAARKLPCGHLFHNSCLRSWLEQDTSCPTCRMSLNIADNNRVREEHQGENLDENLVPVAAAEGRPRLNQHNHFFHFDGSRIASWLPSFSVEVMHTTNILGITQASNSQLNAMAHQIQEMFPQVPYHLVLQDLQLTRSVEITTDNILEGRIQVPFPTQRSDSIRPALNSPVERPSSDQEEGETSAQTERVPLDLSPRLEETLDFGEVEVEPSEVEDFEARGSRFSKSADERQRMLVQRKDELLQQARKRFLNKSSEDDAASESFLPSEGASSDPVTLRRRMLAAAAERRLQKQQTS

SEQ ID NO: 361 - DNA, 1927 bp, Homo sapiens
  CDS (144)..(830)
gtccagttggttgccgcggcagtctctccgagcagcgcatttgtcttctaggctgcttggttcgtgcctccgagaaaggggtctcctgctgccagctaagtgtgggagaacttgtgcacgtatctcccctccgaatcccaacgatgggtaacgccagctttggctccaaggaacagaagctgctgaagcggttgcggcttctgcccgccctgcttatcctccgcgccttcaagccccacaggaagatcagagattaccgcgtcgtggtagtcggcaccgctggtgtggggaaaagtacgctgctgcacaagtgggcgagcggcaacttccgtcatgagtacctgccgaccattgaaaatacctactgccagttgctgggctgcagccacggtgtgctttccctgcacatcaccgacagcaagagtggcgacggcaaccgcgctctgcagcgccacgttatagcccggggccacgccttcgtcctggtctactcagtcaccaagaaggaaaccctggaagagctgaaggccttctatgagctgatctgcaagatcaaaggtaacaacctgcataagttccccatcgtgctggtgggcaataaaagtgatgacacccaccgggaggtggccctgaatgatggtgccacctgtgcgatggagtggaattgcgccttcatggagatttcagccaagaccgatgtgaatgtgcaggagctgttccacatgctgctgaattacaagaaaaagcccaccaccggcctccaggagcccgagaagaaatcccagatgcccaacaccactgagaagctgcttgacaagtgcataatcatgtgagccctgggccttaagagccagctcttcctatcctgtagcgtgtagaaaacgtggactcatttcactatgttacatgtacatggttgattttgtgctgttgtttggactgtaacatccatgttgtcaatacgtataccttgtaagtggataacttttctttttcccaggccagagaattcaaattgttaaaacattggcatttgaagaggagaacaaaatgtagcatgatgtatttaaagtaaggcctttagtaatgaatgtaatgagagaaaatgttttgaaaagaacaaaacatcaaaatgaatagaaagaaaaattggaaggcgtccttttggtaacccgattattgtgtattacctttaaatatttcacatcctgtaagtgcttaatcatatcttttaattgtgtatttaagaaaagtgttttcacaacaaaagcttttgataaattgctgcgtgacatatactaaataaaaaaatgaatatgttgatcattaggggtgtgggagcagagaaaattgtgaaagtgactctcactaaagatgttagtagtttctcatgtcatttaaaaatgtttgagtattctgcatagcagtttgtaaaagtgtaacagcttattgacttaataaagcttttcctgcatgcaatcagctgtaagaatttgtctcaccagaaaacaaaacattgcccattgtattaaaatttaaaccatatctgttaaaagtttccaataagaacttcacacatggatgtccttgccatgttgaaattatccaatatgggaggggggtgttttagggaggtctctgcaatacagagctgttttgtgtctttcctgaactgacatcccgaagaactccaggcatctttgaggaagatggtcacagtgttgctgtctcagaggaagcgggtgaaaagcaagcctctgccttctgcctcttcctatattctgaaatactggatataggcaatagggagcagaatgaaagacaaggggaggaatgatatttgagagactcccccataagggagtttttaaagagattatatttgaacataattttttgagcgagggaataaagtatacatatcctt

SEQ ID NO: 362 - protein, 229 aa, Homo sapiens; identical to SEQ ID NO: 242

SEQ ID NO: 363 - DNA, 928 bp, Homo sapiens
  CDS (486)..(926)
aaatttagccgctccggccacaggcagcgcttcgccagccgaggaaccggacgcggacaccgccgccccgcgagcctccagcccctcgcctgttgccgcgcgagtcccgggcccggagcgctaggagcgcgcggtgagggagcgggaccccgccgggacccgagggggcgcggcggggaggggaacggggagtcagcccgcgctgtgtctcggggccggccggcaggtgaagctctccgcggtccgctaggcggggacggtgtggggcgggcggcgccgggaccgaggaacgctgcggggcgagcggggcgtagggtcctcccgcagccccggccgccgccgccctcccgagtttctgccgaaagccccgggtcctccaccacctcccagcccgtggccggcgctgcgaattcggtgggattcgcctttctttgggggagtgacgcttacgagagccatttcctccgcgctcgcaggaaggagccatggctctggacgggataaggatgccagatggctgctacgcggacgggacgtgggaactgagtgtccatgtgacggacctgaaccgcgatgtcaccctgagagtgaccggcgaggtgcacattggaggcgtgatgcttaagctggtggagaaactcgatgtaaaaaaagattggtctgaccatgctctctggtgggaaaagaagagaacttggcttctgaagacacattggaccttagataagtatggtattcaggcagatgctaagcttcagttcacccctcagcacaaactgctccgcctgcagcttcccaacatgaagtatgtgaaggtgaaagtgaatttctctgatagagtcttcaaagctgtttctgacatctgtaagacttttaatatcagacaccccgaagaactttctctcttaaagaaacccagagatccaac

SEQ ID NO: 364 - protein, 147 aa, Homo sapiens
MALDGIRMPDGCYADGTWELSVHVTDLNRDVTLRVTGEVHIGGVMLKLVEKLDVKKDWSDHALWWEKKRTWLLKTHWTLDKYGIQADAKLQFTPQHKLLRLQLPNMKYVKVKVNFSDRVFKAVSDICKTFNIRHPEELSLLKKPRDP

SEQ ID NO: 365 - DNA, 837 bp, Homo sapiens
  CDS (1)..(522)
gaagatgcagagtcagaagatgaagaggaggaggatgtgaaactcttaagtatatctggaaagcggtctgcccctggaggtggtagcaaggttccacagaaaaaagtaaaacttgctgctgatgaagatgatgacgatgatgatgaagaggatgatgatgaagatgatgatgatgatgattttgatgatgaggaagctgaagaaaaagcgccagtgaagaaatctatacgagatactccagccaaaaatgcacaaaagtcaaatcagaatggaaaagactcaaaaccatcatcaacaccaagatcaaaaggacaagaatccttcaagaaacaggaaaaaactcctaaaacaccaaaaggacctagttctgtagaagacattaaagcaaaaatgcaagcaagtatagaaaaaggtggttctcttcccaaagtggaagccaaattcatcaattatgtgaagaattgcttccggatgactgaccaagaggctattcaagatctctggcagtggaggaagtctctttaagaaaatagtttaaacaatttgttaaaaaattttccgtcttatttcatttctgtaacagttgatatctggctgtcctttttataatgcagagtgagaactttccctaccgtgtttgataaatgttgtccaggttctattgccaagaatgtgttgtccaaaatgccgtttagtttttaaagatggaactccaccctttgcttggttttaagtatgtatggaatgttatgataggacatagtagtagcggtggtcagacatggaaatggtggggagacaaaaatatacatgtgagataaaactcagtattttaat

SEQ ID NO: 366 - protein, 174 aa, Homo sapiens
EDAESEDEEEEDVKLLSISGKRSAPGGGSKVPQKKVKLAADEDDDDDDEEDDDEDDDDDDFDDEEAEEKAPVKKSIRDTPAKNAQKSNQNGKDSKPSSTPRSKGQESFKKQEKTPKTPKGPSSVEDIKAKMQASIEKGGSLPKVEAKFINYVKNCFRMTDQEAIQDLWQWRKSL

SEQ ID NO: 367 - DNA, 864 bp, Homo sapiens
  CDS (75)..(863)
tcctgtctgtccgaacccagacacaagtcttcactccttcctgcgagccctgaggaagccttctttccccagacatggccaacaagggtccttcctatggcatgagccgcgaagtgcagtccaaaatcgagaagaagtatgacgaggagctggaggagcggctggtggagtggatcatagtgcagtgtggccctgatgtgggccgcccagaccgtgggcgcttgggcttccaggtctggctgaagaatggcgtgattctgagcaagctggtgaacagcctgtaccctgatggctccaagccggtgaaggtgcccgagaacccaccctccatggtcttcaagcagatggagcaggtggctcagttcctgaaggcggctgaggactatggggtcatcaagactgacatgttccagactgttgacctctttgaaggcaaagacatggcagcagtgcagaggaccctgatggctttgggcagcttggcagtgaccaagaatgatgggcactaccgtggagatcccaactggtttatgaagaaagcgcaggagcataagagggaattcgcagagagccagctgcaggagggaaagcatgtcattggccttcagatgggcagctcctccctgtgcctccagcctcagcccaacttcttacccgaaagcatcactgccttggcccctccctcccggctgcccccatcacctctactgtctcctccctgggctaagcaggggagaagcgggctgggggtagcctggatgtgggccaagtccaccgtcctccttggcggcaaaagcccattgaagaagaaccagcccagcctgccccctatcttgtcctggaatatttttggggttggaactc

SEQ ID NO: 368 - protein, 263 aa, Homo sapiens [sequence omitted]

SEQ ID NO: 369 - DNA, 1621 bp, Homo sapiens
  CDS (277)..(1620)
tcatcttcctcctcctcatctagtgactcagatagctcaagtgattctcagtcctcttctgattcctctgattccgaaagtgctactgaagagaaatcaaagaaaagaaaaaagaaacatcggaaaaattcccgaaaacacaagaaagaaaagaaaaagcgaaagaaaagcaagaagagtgcatctagtgagagtgaagctgaaaatcttgaagcacaaccccagtctactgtccgtccagaagagatccctcctatacctgaaaatagattcctaatgagaaaaagtcctcctaaagctgatgagaaggaaaggaaaaacagagagagagaaagggaaagagagtgtaatccacctaactcccagcctgcttcataccagagacgacttttagttactagatctggcaggaaaattaaaggaagaggaccaaagcgttatcgaactccttccagatccagatcaagggatcgtttcagacgtagtgagactcctccacattggaggcaagagatgcagagagctcaaagaatgagggtatcaagtggtgaaagatggatcaagggggataagagtgagttgaatgaaataaaagaaaatcagagaagtccagttagagtaaaagagagaaaaataacagatcacaggaatgtatctgagagtccaaacagaaaaaatgaaaaggagaagaaagttaaagaccataaatctaacagcaaagagagagacatcagaagaaattcagaaaaagaagacaagtataaaaacaaagtgaagaaaagggccaaatctaaaagtaggagtaagagcaaagagaaatcaaagagtaaagaaagagattcaaaacataatagaaatgaagaaaagaggatgaggtcaaggagtaaaggaagggatcatgaaaatgttaaagaaaaagaaaagcagtctgattctaaaggaaaagatcaggaaaggagtagaagtaaagagaagtctaaacagttagaatcaaagagtaatgagcatgatcacagtaaaagtaaggaaaaggatagacgcgcacaatccaggagtagagaatgtgatataactaaaggtaaacacagttataatagcagaacaagagaacgaagcagaagtagggacagaagcagaagagtgcgatcaagaacccatgacagagatcgcagcagaagcaaggagtaccatagatacagagaacaggaatacaggagaagaggacggtcacgaagccgagagagaggaacaccaccaggaagatcaagaagtaaagataggaggagaaggaggagagactcacggagctcagagagagaagaaagtcaaagcagaaacaaagacaaatacagaaaccaagagagtaagagctcacacagaaaagaaaattctgagagtgagaaaagaatgtactctaaaagtcgtgatcataatagctcaaataacagcagggaaaaaaaggctgatagagatcaaagtcccttctcaaaaataaaacaaagcagtcaggacaatgaattaaagtcctccatgttgaaaaataaggaggatgagaagatcagatcctcagtggaaaaagaaaaccaaaaatcaaaaggtcaagaaaatgaccatgtacatg

SEQ ID NO: 370 - protein, 448 aa, Homo sapiens
MRKSPPKADEKERKNRERERERECNPPNSQPASYQRRLLVTRSGRKIKGRGPKRYRTPSRSRSRDRFRRSETPPHWRQEMQRAQRMRVSSGERWIKGDKSELNEIKENQRSPVRVKERKITDHRNVSESPNRKNEKEKKVKDHKSNSKERDIRRNSEKEDKYKNKVKKRAKSKSRSKSKEKSKSKERDSKHNRNEEKRMRSRSKGRDHENVKEKEKQSDSKGKDQERSRSKEKSKQLESKSNEHDHSKSKEKDRRAQSRSRECDITKGKHSYNSRTRERSRSRDRSRRVRSRTHDRDRSRSKEYHRYREQEYRRRGRSRSRERGTPPGRSRSKDRRRRRRDSRSSEREESQSRNKDKYRNQESKSSHRKENSESEKRMYSKSRDHNSSNNSREKKADRDQSPFSKIKQSSQDNELKSSMLKNKEDEKIRSSVEKENQKSKGQENDHVH

SEQ ID NO: 371 - DNA, 3767 bp, Homo sapiens
  CDS (60)..(2369)
tacatgaaaagcttgtcctccagaacccatccttgggttcttgtccctcagaagtctcaatgcctacttcagaagaaacattgtttttgccagaaaaccagttcagctggcatattgcttgcaacaactgccaaagaaggattgttggtgtccgctaccagtgtagcctatgcccatcctacaatatctgtgaagattgtgaagcagggccatatggccatgacactaaccacgtcctgctgaagttgcggagacctgttgtgggctcctctgaaccgttctgtcactcaaagtactctactcctcgtcttcctgctgctctggaacaagtcaggctccagaaacaggttgataagaactttcttaaagcagaaaagcaaaggttgcgagctgagaagaaacaacgtaaagcagaggtcaaggaacttaaaaagcagcttaaactccataggaaaattcacctgtggaattcaatccatggactccagagccccaagtctcctttaggccgacctgagagcttgctccagtctaataccctgatgccccctttgcagccctgtacctccgttatgccaatgctcagtgcagcatttgtggatgagaatttgcctgatgggactcaccttcagccaggaaccaagtttatcaaacactggaggatgaaaaatacaggaaatgtaaagtggagtgcagacacaaagctcaagttcatgtggggaaacctgactttggcttccacagaaaagaaggatgttttggttccctgcctcaaggccggccatgtgggagttgtatctgtggagttcattgccccagccttggagggaacgtatacttcccattggcgtctttctcacaaaggccagcaatttgggcctcgggtctggtgcagtatcatagtagatcctttcccctccgaagagagccctgataacattgaaaagggcatgatcagctcaagcaaaactgatgatctcacctgccagcaagaggaaacttttcttctggctaaagaagaaagacagcttggtgaagtgactgagcagacagaagggacagcagcctgcatcccacagaaggcaaaaaatgttgccagtgagagggagctctacatcccatctgtggatcttctgactgcccaggacctgctgtcctttgagctgttggatataaacattgttcaagagttggagagagtgccccacaacacccctgtggatgtgactccctgcatgtctcctctgccacatgacagtcctttaatagagaagccaggcttggggcagatagaggaagagaatgaaggggcaggatttaaagcacttcctgattctatggtgtcagtaaagaggaaggctgagaacattgcttctgtggaggaagcagaagaagacctgagtgggacccagtttgtgtgtgagacagtaatccgatcccttaccttggatgctgccccagaccacaaccctccttgcagacagaagtccttgcagatgacatttgccttgcctgaaggaccacttggaaatgagaaggaggagattatccatatcgctgaggaagaagctgtcatggaggaggaggaggatgaggaggatgaggaggaggaggatgagctcaaagatgaagttcaaagtcagtcctctgcttcctcagaggattacatcatcatcctgcctgagtgctttgataccagccgccccctgggggattctatgtacagctctgcgctctcacagccaggcctggagcgaggtgctgaaggcaagcctggggttgaggctgggcaggaaccagctgaggctggggaaagactccctggaggggagaaccagccacaggagcacagcataagtgacatcctcacgacctcacagactctggaaacagtgcccctaatcccagaggtagtggagcttccaccgtcactgcccaggagctctccttgtgtacatcatcatggttccccaggagtggatttaccagttaccataccagaagtttcttcagtccctgatcagatcagaggagagcccagaggctcatcaggacttgtaaacagcagacagaagagctatgaccactcaaggcaccatcatgggagcagcattgctggaggactggtgaagggggctttgtctgttgctgcctctgcatacaaggccctgtttgctgggccaccagtcactgcacagccaataatttctgaagatcagacagcagccctgatggcccatctctttgaaatgggattctgtgacaggcagctgaacctacggctgctgaagaaacacaattacaatatcctgcaggttgtgacagaacttcttcagttaaacaacaacgactggtacagccaacgctattgaggagtgaccttgtattaaataactgcctgctgctcagagatgatctttattctgtcattggggtatgggatagaagcccttgcttatttttaatctgatgaatctgtatagagcccatcgttgagttaccaagacaatacctgctacagtattttggggagcaaactaaagaccagaacttaaattttcactttagacattggatgaatagtatgaagacagtttttcagttgatttggataaaactattttagtgcattgacaagtgtaacttcaacttcatatagaaccatttttctttctgcttttattgaaactgagtatttttctttggctaatgtggattttttatggggatatctgttaattttcaggttttgaaagacattaacctcggaagttgtttttaagaattattctcataattcttattctcataatttctgtaatccacctcaagcttcatagttatttggcattgaaataacacccagagcatgatagaaatgttgttactcttcctctctcaaggagaaagtaattttcctgcaatacttaataattggcaccgttgctttctaaagactccatggtgcattcaagagtatccaacttcaagggaatctccgcatttcaatgaaaggaggaagagtgtgctgataaacctaccagcacctattgagcaatgtctattatagtaattttgcatacatttttatttaagggaaaaaatataggtattgtgaaatattttgctaatcttatagaaaaggaaaaaatcccgttatttaaagggaaaagtaaatttaacagttgccttttttcttaatgtcagggcagatcttattttacagtacagtgggggaaatagaaacatgtgaaaggcaaaaggcaggctcctaaattaatgtcagtgaagttcagggtgggcaaatgagtgtgtgtgaggtataggaaatgctgatgacttctttaatgcttgaagtccgttcacaggtatctagccctagaatgcctagaacaggaagaggcagctggtgttctgcaaaacttggacaggggcaaagttgctgaaaaagttttggtttaacccgaagataagtggaaaagagcttgtccatgaacccaggttctcactctgtttacagaagtgtgttgagtacagttggtgaaggaagaggtaacaaaaaatgctaaatattttatccatgaaaatgacttccagaaaaggaagaatatgaaccccagaccgaaggggaaaagatagttaatagtattatctaacctggttggtatttgtaatgaatggtgattttaattagtcattagccataatgatgtttatttacagtataactcctgaatgctacttaaataaaccaggattcaaactgc

SEQ ID NO: 372 - protein, 770 aa, Homo sapiens
MPTSEETLFLPENQFSWHIACNNCQRRIVGVRYQCSLCPSYNICEDCEAGPYGHDTNHVLLKLRRPVVGSSEPFCHSKYSTPRLPAALEQVRLQKQVDKNFLKAEKQRLRAEKKQRKAEVKELKKQLKLHRKIHLWNSIHGLQSPKSPLGRPESLLQSNTLMPPLQPCTSVMPMLSAAFVDENLPDGTHLQPGTKFIKHWRMKNTGNVKWSADTKLKFMWGNLTLASTEKKDVLVPCLKAGHVGVVSVEFIAPALEGTYTSHWRLSHKGQQFGPRVWCSIIVDPFPSEESPDNIEKGMISSSKTDDLTCQQEETFLLAKEERQLGEVTEQTEGTAACIPQKAKNVASERELYIPSVDLLTAQDLLSFELLDINIVQELERVPHNTPVDVTPCMSPLPHDSPLIEKPGLGQIEEENEGAGFKALPDSMVSVKRKAENIASVEEAEEDLSGTQFVCETVIRSLTLDAAPDHNPPCRQKSLQMTFALPEGPLGNEKEEIIHIAEEEAVMEEEEDEEDEEEEDELKDEVQSQSSASSEDYIIILPECFDTSRPLGDSMYSSALSQPGLERGAEGKPGVEAGQEPAEAGERLPGGENQPQEHSISDILTTSQTLETVPLIPEVVELPPSLPRSSPCVHHHGSPGVDLPVTIPEVSSVPDQIRGEPRGSSGLVNSRQKSYDHSRHHHGSSIAGGLVKGALSVAASAYKALFAGPPVTAQPIISEDQTAALMAHLFEMGFCDRQLNLRLLKKHNYNILQVVTELLQLNNNDWYSQRY

SEQ ID NO: 373 - DNA, 3767 bp, Homo sapiens
  CDS (60)..(2369)
tacatgaaaagcttgtcctccagaacccatccttgggttcttgtccctcagaagtctcaatgcctacttcagaagaaacattgtttttgccagaaaaccagttcagctggcatattgcttgcaacaactgccaaagaaggattgttggtgtccgctaccagtgtagcctatgcccatcctacaatatctgtgaagattgtgaagcagggccatatggccatgacactaaccacgtcctgctgaagttgcggagacctgttgtgggctcctctgaaccgttctgtcactcaaagtactctactcctcgtcttcctgctgctctggaacaagtcaggctccagaaacaggttgataagaactttcttaaagcagaaaagcaaaggttgcgagctgagaagaaacaacgtaaagcagaggtcaaggaacttaaaaagcagcttaaactccataggaaaattcacctgtggaattcaatccatggactccagagccccaagtctcctttaggccgacctgagagcttgctccagtctaataccctgatgctccctttgcagccctgtacctccgttatgccaatgctcagtgcagcatttgtggatgagaatttgcctgatgggactcaccttcagccaggaaccaagtttatcaaacactggaggatgaaaaatacaggaaatgtaaagtggagtgcagacacaaagctcaagttcatgtggggaaacctgactttggcttccacagaaaagaaggatgttttggttccctgcctcaaggccggccatgtgggagttgtatctgtggagttcattgccccagccttggagggaacgtatacttcccattggcgtctttctcacaaaggccagcaatttgggcctcgggtctggtgcagtatcatagtagatcctttcccctccgaagagagccctgataacattgaaaagggcatgatcagctcaagcaaaactgatgatctcacctgccagcaagaggaaacttttcttctggctaaagaagaaagacagcttggtgaagtgactgagcagacagaagggacagcagcctgcatcccacagaaggcaaaaaatgttgccagtgagagggagctctacatcccatctgtggatcttctgactgcccaggacctgctgtcctttgagctgttggatataaacattgttcaagagttggagagagtgccccacaacacccctgtggatgtgactccctgcatgtctcctctgccacatgacagtcctttaatagagaagccaggcttggggcagatagaggaagagaatgaaggggcaggatttaaagcacttcctgattctatggtgtcagtaaagaggaaggctgagaacattgcttctgtggaggaagcagaagaagacctgagtgggacccagtttgtgtgtgagacagtaatccgatcccttaccttggatgctgccccagaccacaaccctccttgcagacagaagtccttgcagatgacatttgccttgcctgaaggaccacttggaaatgagaaggaggagattatccatatcgctgaggaagaagctgtcatggaggaggaggaggatgaggaggatgaggaggaggaggatgagctcaaagatgaagttcaaagtcagtcctctgcttcctcagaggattacatcatcatcctgcctgagtgctttgataccagccgccccctgggggattctatgtacagctctgcgctctcacagccaggcctggagcgaggtgctgaaggcaagcctggggttgaggctgggcaggaaccagctgaggctggggaaagactccctggaggggagaaccagccacaggagcacagcataagtgacatcctcacgacctcacagactctggaaacagtgcccctaatcccagaggtagtggagcttccaccgtcactgcccaggagctctccttgtgtacatcatcatggttccccaggagtggatttaccagttaccataccagaagtttcttcagtccctgatcagatcagaggagagcccagaggctcatcaggacttgtaaacagcagacagaagagctatgaccactcaaggcaccatcatgggagcagcattgctggaggactggtgaagggggctttgtctgttgctgcctctgcatacaaggccctgtttgctgggccaccagtcactgcacagccaataatttctgaagatcagacagcagccctgatggcccatctctttgaaatgggattctgtgacaggcagctgaacctacggctgctgaagaaacacaattacaatatcctgcaggttgtgacagaacttcttcagttaaacaacaacgactggtacagccaacgctattgaggagtgaccttgtattaaataactgcctgctgctcagagatgatctttattctgtcattggggtatgggatagaagcccttgcttatttttaatctgatgaatctgtatagagcccatcgttgagttaccaagacaatacctgctacagtattttggggagcaaactaaagaccagaacttaaattttcactttagacattggatgaatagtatgaagacagtttttcagttgatttggataaaactattttagtgcattgacaagtgtaacttcaacttcatatagaaccatttttctttctgcttttattgaaactgagtatttttctttggctaatgtggattttttatggggatatctgttaattttcaggttttgaaagacattaacctcggaagttgtttttaagaattattctcataattcttattctcataatttctgtaatccacctcaagcttcatagttatttggcattgaaataacacccagagcatgatagaaatgttgttactcttcctctctcaaggagaaagtaattttcctgcaatacttaataattggcaccgttgctttctaaagactccatggtgcattcaagagtatccaacttcaagggaatctccgcatttcaatgaaaggaggaagagtgtgctgataaacctaccagcacctattgagcaatgtctattatagtaattttgcatacatttttatttaagggaaaaaatataggtattgtgaaatattttgctaatcttatagaaaaggaaaaaatcccgttatttaaagggaaaagtaaatttaacagttgccttttttcttaatgtcagggcagatcttattttacagtacagtgggggaaatagaaacatgtgaaaggcaaaaggcaggctcctaaattaatgtcagtgaagttcagggtgggcaaatgagtgtgtgtgaggtataggaaatgctgatgacttctttaatgcttgaagtccgttcacaggtatctagccctagaatgcctagaacaggaagaggcagctggtgttctgcaaaacttggacaggggcaaagttgctgaaaaagttttggtttaacccgaagataagtggaaaagagcttgtccatgaacccaggttctcactctgtttacagaagtgtgttgagtacagttggtgaaggaagaggtaacaaaaaatgctaaatattttatccatgaaaatgacttccagaaaaggaagaatatgaaccccagaccgaaggggaaaagatagttaatagtattatctaacctggttggtatttgtaatgaatggtgattttaattagtcattagccataatgatgtttatttacagtataactcctgaatgctacttaaataaaccaggattcaaactgc

SEQ ID NO: 374 - protein, 770 aa, Homo sapiens
MPTSEETLFLPENQFSWHIACNNCQRRIVGVRYQCSLCPSYNICEDCEAGPYGHDTNHVLLKLRRPVVGSSEPFCHSKYSTPRLPAALEQVRLQKQVDKNFLKAEKQRLRAEKKQRKAEVKELKKQLKLHRKIHLWNSIHGLQSPKSPLGRPESLLQSNTLMLPLQPCTSVMPMLSAAFVDENLPDGTHLQPGTKFIKHWRMKNTGNVKWSADTKLKFMWGNLTLASTEKKDVLVPCLKAGHVGVVSVEFIAPALEGTYTSHWRLSHKGQQFGPRVWCSIIVDPFPSEESPDNIEKGMISSSKTDDLTCQQEETFLLAKEERQLGEVTEQTEGTAACIPQKAKNVASERELYIPSVDLLTAQDLLSFELLDINIVQELERVPHNTPVDVTPCMSPLPHDSPLIEKPGLGQIEEENEGAGFKALPDSMVSVKRKAENIASVEEAEEDLSGTQFVCETVIRSLTLDAAPDHNPPCRQKSLQMTFALPEGPLGNEKEEIIHIAEEEAVMEEEEDEEDEEEEDELKDEVQSQSSASSEDYIIILPECFDTSRPLGDSMYSSALSQPGLERGAEGKPGVEAGQEPAEAGERLPGGENQPQEHSISDILTTSQTLETVPLIPEVVELPPSLPRSSPCVHHHGSPGVDLPVTIPEVSSVPDQIRGEPRGSSGLVNSRQKSYDHSRHHHGSSIAGGLVKGALSVAASAYKALFAGPPVTAQPIISEDQTAALMAHLFEMGFCDRQLNLRLLKKHNYNILQVVTELLQLNNNDWYSQRY

SEQ ID NO: 375 - DNA, 4654 bp, Homo sapiens; identical to SEQ ID NO: 259
  CDS (141)..(3038)

SEQ ID NO: 376 - protein, 966 aa, Homo sapiens; identical to SEQ ID NO: 256

SEQ ID NO: 377 - DNA, 2271 bp, Homo sapiens
  CDS (80)..(619)
actgcagcaccagccgtctgcagctccggccgccacttgcgcctctccagcctccgcaggcccaaccgccgccagcaccatggccagcaccatttccgcctacaaggagaagatgaaggagctgtcggtgctgtcgctcatctgctcctgcttctacacacagccgcaccccaataccgtctaccagtacggggacatggaggtgaagcagctggacaagcgggcctcaggccagagcttcgaggtcatcctcaagtccccttctgacctgtccccagagagccctatgctctcctccccacccaagaagaaggacacctccctggaggagctgcaaaagcggctggaggcagccgaggagcggaggaagacgcaggaggcgcaggtgctgaagcagctggcggagcggcgcgagcacgagcgcgaggtgctgcacaaggcgctggaggagaataacaacttcagccgccaggcggaggagaagctcaactacaagatggagctcagcaaggagatccgcgaggcacacctggccgcactgcgcgagcggctgcgcgagaaggagctgcacgcggccgaggtgcgcaggaacaaggagcagcgagaagagatgtcgggctaagggcccgggacgggcggcgcccatcctgcgacggaacacgttcgggttttggttttgtttcgttcacctctgtctagatgcaacttttgttcctcctcccccaccccagcccccagcttcatgcttctcttccgcactcagccgccctgccctgtcctcgtggtgagtcgctgaccacggcttcccctgcaggagccgccgggcgtgagacgcggtccctcggtgcagacaccaggccgggcgcggctgggtcccccgggggccctgtgagagaggtggcggtgaccgtggtaaacccagggcggtggcgtgggatcgcgggtccttacgctgggctgtctggtcagcacgtgcaggtcagggcaggtcctctgagccggcgcccctggccagcaggcgaggctacagtacctgctgtctttccagggggaaggggctccccatgagggaggggcgacgggggaggggggtgatggtgcctgggagcctgcgtgtgcagccggtgcttgttgaactggcaggcgggtgggtgggggctgcagctttccttaatgtggttgcacaggggtcctctgagaccacctggcgtgaggtggacaccctgggccttcctggaagcctgcagttgggggcctgccctgagtctgctggggagtgggcattctctgccagggacccatgagcaggctgcatggtctagaggttgtgggcagcatggacagtcccccactcagaagtgcaagagtcccaaagagcctctggcccaggcccctccgtgggacagccccgccgcccctccccaccagggctttgcagatgtccttgaaagacccaccctagagccctttggagtgctggcccctcctgtgccctctgccctggtggaagcggcagccacaagtcctcctcagggagccccaagggggattttgtgggaccgctgcccacagatccaggtgttggaagggcagcgggtaaggttcccaagccagccccaacacccttcccacttggcacccagagggggctgtgggtggaggcctgactccaggcctctcctgcccacaccctctgggctgagttccttctttcccttggacgcccagtgctggccttggaggacggtcagctggaggatggcggtgggggaggctgtctttgtaccactgcagcatcccccacttctccacggaagccccatcccaaagctgctgcctggccccttgctgtaaagtgtgaagggggcggctgagttctcttaggacccagagccagggccctcaacttccatcctgcgggaggccttggccgggcactgccagtgtcttccagagccacacccagggaccacgggaggatcctgacccctgcagggctcaggggtcagcagggacccactgccccatctccctctccccaccaagacagccccagaaggagcagccagctgggatgggaacccaaggctgtccacatctggcttttgtgggactcagaaagggaagcagaactgagggctgggatattcctcatggtggcagcgctcatagcgaaagcctactgtaatatgcacccatctcatccacgtagtaaagtgaacttaaaaattcaatcaaatgaacaattaaataaacacctgtgtgtttaag

SEQ ID NO: 378 - protein, 180 aa, Homo sapiens
MASTISAYKEKMKELSVLSLICSCFYTQPHPNTVYQYGDMEVKQLDKRASGQSFEVILKSPSDLSPESPMLSSPPKKKDTSLEELQKRLEAAEERRKTQEAQVLKQLAERREHEREVLHKALEENNNFSRQAEEKLNYKMELSKEIREAHLAALRERLREKELHAAEVRRNKEQREEMSG

SEQ ID NO: 379 - DNA, 1927 bp, Homo sapiens
  CDS (94)..(1443)
cttgctgctggaaacgcagttccggttaggcggctgagtttgtttacgttgctaacagatctagcccctgctttccctagttccagttccaagatggggaaatccttcgccaacttcatgtgcaagaaagactttcatcctgcctccaaatccaatatcaaaaaagtatggatggcagaacagaaaatatcatatgataagaagaaacaagaagaattgatgcagcaatatcttaaagaacaagaatcatatgataatagattgcttatgggagatgaacgtgtaaagaatggccttaatttcatgtatgaagccccaccaggagctaaaaaagaaaacaaagagaaagaagaaacagaaggagagaccgaatacaaatttgaatggcagaaaggagccccacgagaaaaatatgccaaagatgacatgaacatcagagatcagccctttggtattcaggttcgaaatgtgaggtgcattaaatgtcacaaatggggtcatgtcaacacagatcgagaatgtcctttgtttggtctttctggaatcaatgcaagttcggttcccactgatggctcagggccatcgatgcacccctcggagctaatagcggagatgagaaacagtgggtttgcactgaaacgaaatgtactggggagaaacttgaccgcaaatgatccatcacaggagtatgttgcaagtgagggtgaagaagatccagaagttgaatttttaaagtcactaacaaccaaacaaaaacagaaacttctcaggaaattagatcgactggagaagaaaaaaaagaaaaaagatagaaaaaagaaaaagtttcagaagagcagaagtaaacacaaaaaacataagtcctcttcttcctcatcttcctcctcctcctcctcttcctctactgggacttcagaaagcagtagtgagagtgagagtaacaataaagaaaaaaaaatacaaaggaagaaaagaaagaaaaacaagtgttcagggcataacaacagtgattctgaagagaaggacaagtctaagaagagaaagcttcatgaagaactttctagcagtcaccataaccgggaaaaagccaaggaaaagcccaggttcttaaaacacgagagttctagggaggacagcaaatggagccattctgattctgacaaaaagtccagaacccataaacatagcccagagaagagaggctctgaaagaaaggaggggagcagcagaagccacggcagggaggaaaggagccggagaagccggagcagaagtcctggtagttacaagcaaagggagacaaggaaacgggcacagcgaaatcctggtgaagagcaaagcagaagaaatgacagcagaagccatggcacagacttgtatagaggagaaaaaatgtacagagagcacccaggaggtacacatactaaagtgacacaaagagaatgaagcagaagtagagaagaaagactgtatgtgacaattacctgggaataaaaatatctccacttttttattgaatacctttagcaaggggtaaattatgtactgttgtctttctaataaaaaagctcaattttaatttttcatctctagactgtcaattcaagtacaaaactacatgagtactatgagaatgaattttgcaaatatttgtaagtaagctattttggggctgtggaaatattttctgttggtaactgtttcttgttccccataccagataaaaaccgcatataactctgtgacattttctttgttctgaaacatcattaaaagaatgacagtacattgaatgggtataatttacttttttcaattcaaatttgttattctaggatttgaatttgcttgaagtgaattgtaataattattcaaattcattagtataaattaaggattaataaatctttaagacttttaagccccc

SEQ ID NO: 380 - protein, 450 aa, Homo sapiens
MGKSFANFMCKKDFHPASKSNIKKVWMAEQKISYDKKKQEELMQQYLKEQESYDNRLLMGDERVKNGLNFMYEAPPGAKKENKEKEETEGETEYKFEWQKGAPREKYAKDDMNIRDQPFGIQVRNVRCIKCHKWGHVNTDRECPLFGLSGINASSVPTDGSGPSMHPSELIAEMRNSGFALKRNVLGRNLTANDPSQEYVASEGEEDPEVEFLKSLTTKQKQKLLRKLDRLEKKKKKKDRKKKKFQKSRSKHKKHKSSSSSSSSSSSSSSTGTSESSSESESNNKEKKIQRKKRKKNKCSGHNNSDSEEKDKSKKRKLHEELSSSHHNREKAKEKPRFLKHESSREDSKWSHSDSDKKSRTHKHSPEKRGSERKEGSSRSHGREERSRRSRSRSPGSYKQRETRKRAQRNPGEEQSRRNDSRSHGTDLYRGEKMYREHPGGTHTKVTQRE

SEQ ID NO: 381 - DNA, 1927 bp, Homo sapiens
  CDS (94)..(1443)
cttgctgctggaaacgcagttccggttaggcggctgagtttgtttacgttgctaacagatctagcccctgctttccctagttccagttccaagatggggaaatccttcgccaacttcatgtgcaagaaagactttcatcctgcctccaaatccaatatcaaaaaagtatggatggcagaacagaaaatatcatatgataagaagaaacaagaagaattgatgcagcaatatcttaaagaacaagaatcatatgataatagattgcttatgggagatgaacgtgtaaagaatggccttaatttcatgtatgaagccccaccaggagctaaaaaagaaaacaaagagaaagaagaaacagaaggagagaccgaatacaaatttgaatggcagaaaggagccccacgagaaaaatatgccaaagatgacatgaacatcagagatcagccctttggtattcaggttcgaaatgtgaggtgcattaaatgtcacaaatggggtcatgtcaacacagatcgagaatgtcctttgtttggtctttctggaatcaatgcaagttcggttcccactgatggctcagggccatcgatgcacccctcggagctaatagcggagatgagaaacagtgggtttgcactgaaacgaaatgtactggggagaaacttgaccgcaaatgatccatcacaggagtatgttgcaagtgagggtgaagaagatccagaagttgaatttttaaagtcactaacaaccaaacaaaaacagaaacttctcaggaaattagatcgactggagaagaaaaaaaagaaaaaagatagaaaaaagaaaaagtttcagaagagcagaagtaaacacaaaaaacataagtcctcttcttcctcatcttcctcctcctcctcctcttcctctactgagacttcagaaagcagtagtgagagtgagagtaacaataaagaaaaaaaaatacaaaggaagaaaagaaagaaaaacaagtgttcagggcataacaacagtgattctgaagagaaggacaagtctaagaagagaaagcttcatgaagaactttctagcagtcaccataaccgggaaaaagccaaggaaaagcccaggttcttaaaacacgagagttctagggaggacagcaaatggagccattctgattctgacaaaaagtccagaacccataaacatagcccagagaagagaggctctgaaagaaaggaggggagcagcagaagccacggcagggaggaaaggagccggagaagccggagcagaagtcctggtagttacaagcaaagggagacaaggaaacgggcacagcgaaatcctggtgaagagcaaagcagaagaaatgacagcagaagccatggcacagacttgtatagaggagaaaaaatgtacagagagcacccaggaggtacacatactaaagtgacacaaagagaatgaagcagaagtagagaagaaagactgtatgtgacaattacctgggaataaaaatatctccacttttttattgaatacctttagcaaggggtaaattatgtactgttgtctttctaataaaaaagctcaattttaatttttcatctctagactgtcaattcaagtacaaaactacatgagtactatgagaatgaattttgcaaatatttgtaagtaagctattttggggctgtggaaatattttctgttggtaactgtttcttgttccccataccagataaaaaccgcatataactctgtgacattttctttgttctgaaacatcattaaaagaatgacagtacattgaatgggtataatttacttttttcaattcaaatttgttattctaggatttgaatttgcttgaagtgaattgtaataattattcaaattcattagtataaattaaggattaataaatctttaagacttttaagccccc

SEQ ID NO: 382 - protein, 450 aa, Homo sapiens
MGKSFANFMCKKDFHPASKSNIKKVWMAEQKISYDKKKQEELMQQYLKEQESYDNRLLMGDERVKNGLNFMYEAPPGAKKENKEKEETEGETEYKFEWQKGAPREKYAKDDMNIRDQPFGIQVRNVRCIKCHKWGHVNTDRECPLFGLSGINASSVPTDGSGPSMHPSELIAEMRNSGFALKRNVLGRNLTANDPSQEYVASEGEEDPEVEFLKSLTTKQKQKLLRKLDRLEKKKKKKDRKKKKFQKSRSKHKKHKSSSSSSSSSSSSSSTETSESSSESESNNKEKKIQRKKRKKNKCSGHNNSDSEEKDKSKKRKLHEELSSSHHNREKAKEKPRFLKHESSREDSKWSHSDSDKKSRTHKHSPEKRGSERKEGSSRSHGREERSRRSRSRSPGSYKQRETRKRAQRNPGEEQSRRNDSRSHGTDLYRGEKMYREHPGGTHTKVTQRE

SEQ ID NO: 383 - DNA, 2473 bp, Homo sapiens
  CDS (247)..(1599)
ctttttttttctttcccagccacagccagggtagggctgataaggcgctgatgcgttgatggcagccttgcagagctagacctgcacttaacttgcagctgcctcccgagcctccaagatgtccacgccctgggtgacaggcggcagggcgctgccccgtgctcccccggctctgctcgacagcagcacgcagtgagagcctcgccgccgccgaggagcaactcatgtaacggcacagccaacaagatgaacggagctttggatcactcagaccaaccagacccagatgccattaagatgtttgtcggacagatcccccggtcatggtcggaaaaggagctgaaagaactttttgagccttacggagccgtctaccagatcaacgtcctccgggaccggagtcagaaccctccgcagagtaaaggttgttgtttcgtaacattttatacaagaaaagctgcacttgaggcccagaatgcactgcacaatattaaaactttacctgggatgcatcatcccattcagatgaaacctgcagatagtgaaaagtccaacgctgtggaagacagaaaattgttcataggaatggtttcgaagaaatgtaatgagaacgacatcagggtgatgttctctccatttggccagatagaagaatgccggatcctccggggacctgatgggctgagtcgaggctgtgcgtttgtcacattttctacaagggcaatggcacagaatgcaatcaaagccatgcatcagtctcagaccatggagggctgctcttcacctatcgtggtgaagtttgctgacactcagaaggacaaagagcaaaggcgcctccagcagcagctcgctcagcagatgcagcagctcaacactgccacctgggggaacctgacagggctgggcggactgaccccacagtatctggcgctcctgcagcaggccacctcctccagcaacctgggtgcgttcagcggcattcaacaaatggcaggcatgaatgctttacagttgcagaacctggcgacgctggctgcttcaacccccaactccactgctggtgcagccatgaactccttgacctctctcgggactcggcaaggactggctggagccactgttggactgaataatattaatgcactagcaggtatggcggctctgaatggaggacttggcgccacaggcttgacgaatggcacggctggcaccatggacgccctcacccaggcctactcaggaattcaacagtacgcagccgccgcgctgcccactctgtacagccagagcctgctgcagcagcagagcgctgcaggcagccagaaggaaggtccagagggggcaaacctctttatttaccaccttccacaggaatttggagaccaggacattctgcagatgttcatgccttttggaaatgttatctctgctaaagtcttcattgacaaacagaccaatctgagcaagtgctttggttttgttagctacgacaatccagtctctgcacaagctgctatccaagctatgaatggctttcagatcggcatgaaacgcttgaaggtgcagctgaagcgttccaaaaacgacagcaaaccttactgatcctaaccccagaggctccctgctctcattttagctttcttaggacatcttcatgcccgttagttcatcgtttgcctagcatgtccctgtggcgtctcaaaaaaaagtttcatcgtcccgtcattgtttctgatgtctttctgacctcacatcatatttggttctcctactgacctttgatctagtttgacctttgaaatttgcatgtgacctcatctagctatgaattctgggaagtcaatgtgaaaaacattgctgcattcatgcaagactgaaatttattattagacaaattcattatagaaaaaacctgtggcaaaaacgtttctttcttattttttttcttttcctaaaacagacttgaaagtattatacagggattggcattcttcccggtcactggtaacaatagcaatatgtgtccagggacacagaatgttggtttctaacagactacttccaaaaacagtttgagaaaaaaactgtctgattttaagtctctagaggtctgtaatagtttttacatttttcaggcagtgtaaagttttttgataaggccattttaggtggctcactttctcattaagatatatatatagaaccactttttgtagattagtataagaaaaatatttaccctgttttggggcaaatgctacctatttgtgtcaccttttgctgaactcacagttagacaatccatggtttaatgcacatgaaattacctatattttatactgtttcaatgtacaggagaaaggttactgtaaactgtgttatgttggtgcttctgtgaattaagttgtggtttcatcatgagtcttaatgttctttgttgataagacaagtttagaattggtttacttaatac

SEQ ID NO: 384 - protein, 451 aa, Homo sapiens
MNGALDHSDQPDPDAIKMFVGQIPRSWSEKELKELFEPYGAVYQINVLRDRSQNPPQSKGCCFVTFYTRKAALEAQNALHNIKTLPGMHHPIQMKPADSEKSNAVEDRKLFIGMVSKKCNENDIRVMFSPFGQIEECRILRGPDGLSRGCAFVTFSTRAMAQNAIKAMHQSQTMEGCSSPIVVKFADTQKDKEQRRLQQQLAQQMQQLNTATWGNLTGLGGLTPQYLALLQQATSSSNLGAFSGIQQMAGMNALQLQNLATLAASTPNSTAGAAMNSLTSLGTRQGLAGATVGLNNINALAGMAALNGGLGATGLTNGTAGTMDALTQAYSGIQQYAAAALPTLYSQSLLQQQSAAGSQKEGPEGANLFIYHLPQEFGDQDILQMFMPFGNVISAKVFIDKQTNLSKCFGFVSYDNPVSAQAAIQAMNGFQIGMKRLKVQLKRSKNDSKPY

SEQ ID NO: 385 - DNA, 2473 bp, Homo sapiens
  CDS (247)..(1599)
ctttttttttctttcccagccacagccagggtagggctgataaggcgctgatgcgttgatggcagccttgcagagctagacctgcacttaacttgcagctgcctcccgagcctccaagatgtccacgccctgggtgacaggcggcagggcgctgccccgtgctcccccggctctgctcgacagcagcacgcagtgagagcctcgccgccgccgaggagcaactcatgtaacggcacagccaacaagatgaacggagctttggatcactcagaccaaccagacccagatgccattaagatgtttgtcggacagatcccccggtcatggtcggaaaaggagctgaaagaactttttgagccttacggagccgtctaccagatcaacgtcctccgggaccggagtcagaaccctccgcagagtaaaggttgttgtttcgtaacattttatacaagaaaagctgcacttgaggcccagaatgcactgcacaatattaaaactttacctgggatgcatcatcccattcagatgaaacctgcagatagtgaaaagtccaacgctgtggaagacagaaaattgttcataggaatggtttcgaagaaatgtaatgagaacgacatcagggtgatgttctctccatttggccagatagaagaatgccggatcctccggggacctgatgggctgagtcgaggctgtgcgtttgtcacattttctacaagggcaatggcacagaatgcaatcaaagccatgcatcagtctcagaccatggagggctgctcttcacctatcgtggtgaagtttgctgacactcagaaggacaaagagcaaaggcgcctccagcagcagctcgctcagcagatgcagcagctcaacactgccacctgggggaacctgacagggctgggcggactgaccccacagtatctggcgctcctgcagcaggccacctcctccagcaacctgggtgcgttcagcggcattcaacaaatggcaggcatgaatgctttacagttgcagaacctggcgacgctggctgcttcaacccccaactccactgctggtgcagccatgaactccttgacctctctcgggactctgcaaggactggctggagccactgttggactgaataatattaatgcactagcaggtatggcggctctgaatggaggacttggcgccacaggcttgacgaatggcacggctggcaccatggacgccctcacccaggcctactcaggaattcaacagtacgcagccgccgcgctgcccactctgtacagccagagcctgctgcagcagcagagcgctgcaggcagccagaaggaaggtccagagggggcaaacctctttatttaccaccttccacaggaatttggagaccaggacattctgcagatgttcatgccttttggaaatgttatctctgctaaagtcttcattgacaaacagaccaatctgagcaagtgctttggttttgttagctacgacaatccagtctctgcacaagctgctatccaagctatgaatggctttcagatcggcatgaaacgcttgaaggtgcagctgaagcgttccaaaaacgacagcaaaccttactgatcctaaccccagaggctccctgctctcattttagctttcttaggacatcttcatgcccgttagttcatcgtttgcctagcatgtccctgtggcgtctcaaaaaaaagtttcatcgtcccgtcattgtttctgatgtctttctgacctcacatcatatttggttctcctactgacctttgatctagtttgacctttgaaatttgcatgtgacctcatctagctatgaattctgggaagtcaatgtgaaaaacattgctgcattcatgcaagactgaaatttattattagacaaattcattatagaaaaaacctgtggcaaaaacgtttctttcttattttttttcttttcctaaaacagacttgaaagtattatacagggattggcattcttcccggtcactggtaacaatagcaatatgtgtccagggacacagaatgttggtttctaacagactacttccaaaaacagtttgagaaaaaaactgtctgattttaagtctctagaggtctgtaatagtttttacatttttcaggcagtgtaaagttttttgataaggccattttaggtggctcactttctcattaagatatatatatagaaccactttttgtagattagtataagaaaaatatttaccctgttttggggcaaatgctacctatttgtgtcaccttttgctgaactcacagttagacaatccatggtttaatgcacatgaaattacctatattttatactgtttcaatgtacaggagaaaggttactgtaaactgtgttatgttggtgcttctgtgaattaagttgtggtttcatcatgagtcttaatgttctttgttgataagacaagtttagaattggtttacttaatac

SEQ ID NO: 386 - protein, 451 aa, Homo sapiens
MNGALDHSDQPDPDAIKMFVGQIPRSWSEKELKELFEPYGAVYQINVLRDRSQNPPQSKGCCFVTFYTRKAALEAQNALHNIKTLPGMHHPIQMKPADSEKSNAVEDRKLFIGMVSKKCNENDIRVMFSPFGQIEECRILRGPDGLSRGCAFVTFSTRAMAQNAIKAMHQSQTMEGCSSPIVVKFADTQKDKEQRRLQQQLAQQMQQLNTATWGNLTGLGGLTPQYLALLQQATSSSNLGAFSGIQQMAGMNALQLQNLATLAASTPNSTAGAAMNSLTSLGTLQGLAGATVGLNNINALAGMAALNGGLGATGLTNGTAGTMDALTQAYSGIQQYAAAALPTLYSQSLLQQQSAAGSQKEGPEGANLFIYHLPQEFGDQDILQMFMPFGNVISAKVFIDKQTNLSKCFGFVSYDNPVSAQAAIQAMNGFQIGMKRLKVQLKRSKNDSKPY

SEQ ID NO: 387 - DNA, 2572 bp, Homo sapiens
  CDS (247)..(1698)
ctttttttttctttcccagccacagccagggtagggctgataaggcgctgatgcgttgatggcagccttgcagagctagacctgcacttaacttgcagctgcctcccgagcctccaagatgtccacgccctgggtgacaggcggcagggcgctgccccgtgctcccccggctctgctcgacagcagcacgcagtgagagcctcgccgccgccgaggagcaactcatgtaacggcacagccaacaagatgaacggagctttggatcactcagaccaaccagacccagatgccattaagatgtttgtcggacagatcccccggtcatggtcggaaaaggagctgaaagaactttttgagccttacggagccgtctaccagatcaacgtcctccgggaccggagtcagaaccctccgcagagtaaaggttgttgtttcgtaacattttatacaagaaaagctgcacttgaggcccagaatgcactgcacaatattaaaactttacctgggatgcatcatcccattcagatgaaacctgcagatagtgaaaagtccaacgctgtggaagacagaaaattgttcataggaatggtttcgaagaaatgtaatgagaacgacatcagggtgatgttctctccatttggccagatagaagaatgccggatcctccggggacctgatgggctgagtcgaggctgtgcgtttgtcacattttctacaagggcaatggcacagaatgcaatcaaagccatgcatcagtctcagaccatggagggctgctcttcacctatcgtggtgaagtttgctgacactcagaaggacaaagagcaaaggcgcctccagcagcagctcgctcagcagatgcagcagctcaacactgccacctgggggaacctgacagggctgggcggactgaccccacagtatctggcgctcctgcagcaggccacctcctccagcaacctgggtgcgttcagcggcattcaacaaatggcaggcatgaatgctttacagttgcagaacctggcgacgctggctgctgctgcagctgcggcccagacctcagccaccagcaccaatgcaaaccctctctctaccacgagcagcgccctgggagccctcacgagtcccgtggctgcttcaacccccaactccactgctggtgcagccatgaactccttgacctctctcgggactctgcaaggactggctggagccactgttggactgaataatattaatgcactagcaggtatggcggctctgaatggaggacttggcgccacaggcttgacgaatggcacggctggcaccatggacgccctcacccaggcctactcaggaattcaacagtacgcagccgccgcgctgcccactctgtacagccagagcctgctgcagcagcagagcgctgcaggcagccagaaggaaggtccagagggggcaaacctctttatttaccaccttccacaggaatttggagaccaggacattctgcagatgttcatgccttttggaaatgttatctctgctaaagtcttcattgacaaacagaccaatctgagcaagtgctttggttttgttagctacgacaatccagtctctgcacaagctgctatccaagctatgaatggctttcagatcggcatgaaacgcttgaaggtgcagctgaagcgttccaaaaacgacagcaaaccttactgatcctaaccccagaggctccctgctctcattttagctttcttaggacatcttcatgcccgttagttcatcgtttgcctagcatgtccctgtggcgtctcaaaaaaaagtttcatcgtcccgtcattgtttctgatgtctttctgacctcacatcatatttggttctcctactgacctttgatctagtttgacctttgaaatttgcatgtgacctcatctagctatgaattctgggaagtcaatgtgaaaaacattgctgcattcatgcaagactgaaatttattattagacaaattcattatagaaaaaacctgtggcaaaaacgtttctttcttattttttttcttttcctaaaacagacttgaaagtattatacagggattggcattcttcccggtcactggtaacaatagcaatatgtgtccagggacacagaatgttggtttctaacagactacttccaaaaacagtttgagaaaaaaactgtctgattttaagtctctagaggtctgtaatagtttttacatttttcaggcagtgtaaagttttttgataaggccattttaggtggctcactttctcattaagatatatatatagaaccactttttgtagattagtataagaaaaatatttaccctgttttggggcaaatgctacctatttgtgtcaccttttgctgaactcacagttagacaatccatggtttaatgcacatgaaattacctatattttatactgtttcaatgtacaggagaaaggttactgtaaactgtgttatgttggtgcttctgtgaattaagttgtggtttcatcatgagtcttaatgttctttgttgataagacaagtttagaattggtttacttaatac

SEQ ID NO: 388 - protein, 484 aa, Homo sapiens
MNGALDHSDQPDPDAIKMFVGQIPRSWSEKELKELFEPYGAVYQINVLRDRSQNPPQSKGCCFVTFYTRKAALEAQNALHNIKTLPGMHHPIQMKPADSEKSNAVEDRKLFIGMVSKKCNENDIRVMFSPFGQIEECRILRGPDGLSRGCAFVTFSTRAMAQNAIKAMHQSQTMEGCSSPIVVKFADTQKDKEQRRLQQQLAQQMQQLNTATWGNLTGLGGLTPQYLALLQQATSSSNLGAFSGIQQMAGMNALQLQNLATLAAAAAAAQTSATSTNANPLSTTSSALGALTSPVAASTPNSTAGAAMNSLTSLGTLQGLAGATVGLNNINALAGMAALNGGLGATGLTNGTAGTMDALTQAYSGIQQYAAAALPTLYSQSLLQQQSAAGSQKEGPEGANLFIYHLPQEFGDQDILQMFMPFGNVISAKVFIDKQTNLSKCFGFVSYDNPVSAQAAIQAMNGFQIGMKRLKVQLKRSKNDSKPY

SEQ ID NO: 389 - DNA, 2286 bp, Homo sapiens
  CDS (210)..(1412)
tgtttgtcggacagatcccccggtcatggtcggaaaaggagctgaaagaactttttgagccttacggagccgtctaccagatcaacgtcctccgggaccggagtcagaaccctccgcagagtaaaggttgttgtttcgtaacattttatacaagaaaagctgcacttgaggcccagaatgcactgcacaatattaaaactttacctgggatgcatcatcccattcagatgaaacctgcagatagtgaaaagtccaacgctgtggaagacagaaaattgttcataggaatggtatcgaagaaatgtaatgagaacgacatcagggtgatgttctctccatttggccagatagaagaatgccggatcctccggggacctgatgggctgagtcgaggctgtgcgtttgtcacattttctacaagggcaatggcacagaatgcaatcaaagccatgcatcagtctcagaccatggagggctgctcttcacctatcgtggtgaagtttgctgacactcagaaggacaaagagcaaaggcgcctccagcagcagctcgctcagcagatgcagcagctcaacactgccacctgggggaacctgacagggctgggcggactgaccccacagtatctggcgctcctgcagcaggccacctcctccagcaacctgggtgcgttcagcggcattcaacaaatggcaggcatgaatgctttacagttgcagaacctggcgacgctggctgctgctgcagctgcggcccagacctcagccaccagcaccaatgcaaaccctctctctaccacgagcagcgccctgggagccctcacgagtcccgtggctgcttcaacccccaactccactgctggtgcagccatgaactccttgacctctctcgggactctgcaaggactggctggagccactgttggactgaataatattaatgcactagcaggtaccatcaacagtatggcggctctgaatggaggacttggcgccacaggcttgacgaatggcacggctggcaccatggacgccctcacccaggcctactcaggaattcaacagtacgcagccgccgcgctgcccactctgtacagccagagcctgctgcagcagcagagcgctgcaggcagccagaaggaaggtccagagggggcaaacctctttatttaccaccttccacaggaatttggagaccaggacattctgcagatgttcatgccttttggaaatgttatctctgctaaagtcttcattgacaaacagaccaatctgagcaagtgctttggttttgttagctacgacaatccagtctctgcacaagctgctatccaagctatgaatggctttcagatcggcatgaaacgcttgaaggtgcagctgaagcgttccaaaaacgacagcaaaccttactgatcctaaccccagaggctccctgctctcattttagctttcttaggacatcttcatgcccgttagttcatcgtttgcctagcatgtccctgtggcgtctcaaaaaaaagtttcatcgtcccgtcattgtttctgatgtctttctgacctcacatcatatttggttctcctactgacctttgatctagtttgacctttgaaatttgcatgtgacctcatctagctatgaattctgggaagtcaatgtgaaaaacattgctgcattcatgcaagactgaaatttattattagacaaattcattatagaaaaaacctgtggcaaaaacgtttctttcttattttttttcttttcctaaaacagacttgaaagtattatacagggattggcattcttcccggtcactggtaacaatagcaatatgtgtccagggacacagaatgttggtttctaacagactacttccaaaaacagtttgagaagaaaactgtctgattttaagtctctagaggtctgtaatagtttttacatttttcaggcagtgtaaagttttttgataaggccattttaggtggctcactttctcattaagatatatatatagaaccactttttgtagattagtataagaaaaatatttaccctgttttggggcaaatgctacctatttgtgtcaccttttgctgaactcacagttagacaatccatggtttaatgcacatgaaattacctatattttatactgtttcaatgtacaggagaaaggttactgtaaactgtgttatgttggtgcttctgtgaattaagttgtggtttcatcatgagtcttaatgttctttgttgataagacaagtttagaattgatttacttaatac

SEQ ID NO: 390 - protein, 401 aa, Homo sapiens
MHHPIQMKPADSEKSNAVEDRKLFIGMVSKKCNENDIRVMFSPFGQIEECRILRGPDGLSRGCAFVTFSTRAMAQNAIKAMHQSQTMEGCSSPIVVKFADTQKDKEQRRLQQQLAQQMQQLNTATWGNLTGLGGLTPQYLALLQQATSSSNLGAFSGIQQMAGMNALQLQNLATLAAAAAAAQTSATSTNANPLSTTSSALGALTSPVAASTPNSTAGAAMNSLTSLGTLQGLAGATVGLNNINALAGTINSMAALNGGLGATGLTNGTAGTMDALTQAYSGIQQYAAAALPTLYSQSLLQQQSAAGSQKEGPEGANLFIYHLPQEFGDQDILQMFMPFGNVISAKVFIDKQTNLSKCFGFVSYDNPVSAQAAIQAMNGFQIGMKRLKVQLKRSKNDSKPY

SEQ ID NO: 391 - DNA, 2584 bp, Homo sapiens
  CDS (247)..(1710)
ctttttttttctttcccagccacagccagggtagggctgataaggcgctgatgcgttgatggcagccttgcagagctagacctgcacttaacttgcagctgcctcccgagcctccaagatgtccacgccctgggtgacaggcggcagggcgctgccccgtgctcccccggctctgctcgacagcagcacgcagtgagagcctcgccgccgccgaggagcaactcatgtaacggcacagccaacaagatgaacggagctttggatcactcagaccaaccagacccagatgccattaagatgtttgtcggacagatcccccggtcatggtcggaaaaggagctgaaagaactttttgagccttacggagccgtctaccagatcaacgtcctccgggaccggagtcagaaccctccgcagagtaaaggttgttgtttcgtaacattttatacaagaaaagctgcacttgaggcccagaatgcactgcacaatattaaaactttacctgggatgcatcatcccattcagatgaaacctgcagatagtgaaaagtccaacgctgtggaagacagaaaattgttcataggaatggtatcgaagaaatgtaatgagaacgacatcagggtgatgttctctccatttggccagatagaagaatgccggatcctccggggacctgatgggctgagtcgaggctgtgcgtttgtcacattttctacaagggcaatggcacagaatgcaatcaaagccatgcatcagtctcagaccatggagggctgctcttcacctatcgtggtgaagtttgctgacactcagaaggacaaagagcaaaggcgcctccagcagcagctcgctcagcagatgcagcagctcaacactgccacctgggggaacctgacagggctgggcggactgaccccacagtatctggcgctcctgcagcaggccacctcctccagcaacctgggtgcgttcagcggcattcaacaaatggcaggcatgaatgctttacagttgcagaacctggcgacgctggctgctgctgcagctgcggcccagacctcagccaccagcaccaatgcaaaccctctctctaccacgagcagcgccctgggagccctcacgagtcccgtggctgcttcaacccccaactccactgctggtgcagccatgaactccttgacctctctcgggactctgcaaggactggctggagccactgttggactgaataatattaatgcactagcaggtaccatcaacagtatggcggctctgaatggaggacttggcgccacaggcttgacgaatggcacggctggcaccatggacgccctcacccaggcctactcaggaattcaacagtacgcagccgccgcgctgcccactctgtacagccagagcctgctgcagcagcagagcgctgcaggcagccagaaggaaggtccagagggggcaaacctctttatttaccaccttccacaggaatttggagaccaggacattctgcagatgttcatgccttttggaaatgttatctctgctaaagtcttcattgacaaacagaccaatctgagcaagtgctttggttttgttagctacgacaatccagtctctgcacaagctgctatccaagctatgaatggctttcagatcggcatgaaacgcttgaaggtgcagctgaagcgttccaaaaacgacagcaaaccttactgatcctaaccccagaggctccctgctctcattttagctttcttaggacatcttcatgcccgttagttcatcgtttgcctagcatgtccctgtggcgtctcaaaaaaaagtttcatcgtcccgtcattgtttctgatgtctttctgacctcacatcatatttggttctcctactgacctttgatctagtttgacctttgaaatttgcatgtgacctcatctagctatgaattctgggaagtcaatgtgaaaaacattgctgcattcatgcaagactgaaatttattattagacaaattcattatagaaaaaacctgtggcaaaaacgtttctttcttattttttttcttttcctaaaacagacttgaaagtattatacagggattggcattcttcccggtcactggtaacaatagcaatatgtgtccagggacacagaatgttggtttctaacagactacttccaaaaacagtttgagaagaaaactgtctgattttaagtctctagaggtctgtaatagtttttacatttttcaggcagtgtaaagttttttgataaggccattttaggtggctcactttctcattaagatatatatatagaaccactttttgtagattagtataagaaaaatatttaccctgttttggggcaaatgctacctatttgtgtcaccttttgctgaactcacagttagacaatccatggtttaatgcacatgaaattacctatattttatactgtttcaatgtacaggagaaaggttactgtaaactgtgttatgttggtgcttctgtgaattaagttgtggtttcatcatgagtcttaatgttctttgttgataagacaagtttagaattgatttacttaatac

SEQ ID NO: 392 - protein, 488 aa, Homo sapiens
MNGALDHSDQPDPDAIKMFVGQIPRSWSEKELKELFEPYGAVYQINVLRDRSQNPPQSKGCCFVTFYTRKAALEAQNALHNIKTLPGMHHPIQMKPADSEKSNAVEDRKLFIGMVSKKCNENDIRVMFSPFGQIEECRILRGPDGLSRGCAFVTFSTRAMAQNAIKAMHQSQTMEGCSSPIVVKFADTQKDKEQRRLQQQLAQQMQQLNTATWGNLTGLGGLTPQYLALLQQATSSSNLGAFSGIQQMAGMNALQLQNLATLAAAAAAAQTSATSTNANPLSTTSSALGALTSPVAASTPNSTAGAAMNSLTSLGTLQGLAGATVGLNNINALAGTINSMAALNGGLGATGLTNGTAGTMDALTQAYSGIQQYAAAALPTLYSQSLLQQQSAAGSQKEGPEGANLFIYHLPQEFGDQDILQMFMPFGNVISAKVFIDKQTNLSKCFGFVSYDNPVSAQAAIQAMNGFQIGMKRLKVQLKRSKNDSKPY

SEQ ID NO: 393 - DNA, 2495 bp, Homo sapiens
  CDS (324)..(1598)
aggaaagaaaagctaaacctgcaacaaagtgtcctgtgcccagaacgcggttaggaagtgtgtgcatacgtctgaaccctaaatggttctcagttctgtaaacttctcctcccactgggtggagtagggcctttaagagcagctggaatgcagttcccctgatcagcgtagccagttgttgcctgtctgaacctctgccagtcctggagactggtgccctgagctccaaccagcgggcctcatcctacaccctcaccaccgcaacttctcacccgagcaagaagcagctcccagagagaaagaacgttcccacctgcctagccatgggagaggacgctgcacaggccgaaaagttccagcaccctgggtctgacatgcggcaggaaaagccctcgagccccagcccgatgccttcctccacaccaagccccagcctgaacctagggaacacagaggaggccatccgggacaactcacaggtgaacgcagtcacggtgctcacgctcctggacaagctggtgaacatgctagacgctgtgcaggagaaccagcacaagatggagcagcgacagatcagtttggagggctccgtgaagggcatccagaatgacctcaccaagctctccaagtaccaggcctccaccagcaacacggtgagcaagctgctggagaagtcccgcaaggtcagcgcccacacgcgcgcggtcaaagagcgcatggataggcagtgcgcacaggtgaagcggctggagaacaaccacgcccagctcctccgacgcaaccatttcaaagtgctcatcttccaggaggaaaatgagatccctgccagcgtgtttgtgaaacagcccgtttccggcgccgtggaagggaaggaggagcttccggatgaaaacaaatccctggaggaaaccctgcacaccgtggacctctcctcagatgatgatttgccccacgatgaggaggccctggaagacagtgccgaggaaaaggtggaagaaagtagggcagagaaaataaaaagatccagcctgaagaaagtggatagcctcaagaaagcattttctcgccagaacatcgagaaaaagatgaacaagctggggacaaagatcgtatctgtagagaggagagagaagattaagaaatctctcacgtcaaatcaccagaaaatatcctcaggaaaaagctcccccttcaaggtttctcccctcactttcgggcggaagaaagtccgagagggagaaagccatgcagaaaatgagaccaagtcagaagacctgcctagcagtgagcagatgccaaatgaccaggaagaggagtcctttgcagagggtcattccgaagcgtccctcgccagcgctctggtggaaggggaaattgcagaggaggctgctgagaaggcgacctccagggggagtaactcggggatggacagcaacatcgacttgactattgtggaagatgaagaggaggagtcagtggccctggaacaggcacagaaggtacgctatgagggtagctacgcgctaacatccgaggaggcggagcgctccgatggggaccccgtgcagcccgccgtgctccaggtgcaccagacctcctgagcttagagccaccgtgccatcctgtgctgtgctcaagcgggcagccagggctgaagaacaaactcttgcacatctccagcacgactcacccactcctgcgttcctgtccaggcagtaatcattgaccatatagtcatagtaagacacacgagaccaggctttaccatgaaagcgacctgtcacggactccacttttaatttgctcttaggttctatctctgtagaatgtctccaagattgaagaagaagctgagcagttgaaaaatgctaatctctttgacttagtcagaaaaaaacagaggataattaagatactagtcatgaaaagtgattcattcttttttgtcattccataagcttgctgaatagtgtaccggtaatatattgtatttccaccgtactctgtgaatctaattattattctttaagtgttgatatataatatacataaatatgtaagctaaacatataactatatgttttaagaagaaaacatctacgaaaggtaaaaagagatgatcagttggttgtttacttgctagaaaccattgttttattgcaaacgaaggaaaaatgaagagattataaaagtcagctaatgaagtaagatacgtagtaaagtcaggactattcaaaaagtaagaaagaaaatttggaaaatgagagaaacaggaaacaaagaatgccgaaaagaatgaaaacagagaaaaaatgtatgtgcttgaaagtaaaatacttacaatagtagcttaactatttggaagacaagatgctctcgacagttgcagtacttacccttggctaagaactgcactgctttgtttaaaggactgcagaccaaggagcgagctttctctcagagcatgcttttctttattaaaattactgatgcag

SEQ ID NO: 394 - protein, 425 aa, Homo sapiens; identical to SEQ ID NO: 274

SEQ ID NO: 395 - DNA, 1402 bp, Homo sapiens
  CDS (59)..(643)
gtatcccctgcggcgcgagcccggggcggctccaagcgccccccagcagacccccatcatgggcagccagagctccaaggctccccggggcgacgtgaccgccgaggaggcagcaggcgcttcccccgcgaaggccaacggccaggagaatggccacgtgaaaagcaatggagacttatcccccaagggtgaaggggagtcgccccctgtgaacggaacagatgaggcagccggggccactggcgatgccatcgagccagcaccccctagccagggtgctgaggccaagggggaggtcccccccaaggagacccccaagaagaagaagaaattctctttcaagaagcctttcaaattgagcggcctgtccttcaagagaaatcggaaggagggtgggggtgattcttctgcctcctcacccacagaggaagagcaggagcagggggagatcggtgcctgcagcgacgagggcactgctcaggaagggaaggccgcagccacccctgagagccaggaaccccaggccaagggggcagaggctagtgcagcctcagaagaagaggcagggccccaggctacagagccatccactccctcggggccggagagtggccctacaccagccagcgctgagcagaatgagtagctaggtaggggcaggtgggtgatctctaagctgcaaaaactgtgctgtccttgtgaggtcactgcctggacctggtgccctggctgccttcctgtgcccagaaaggaaggggctattgcctcctcccagccacgttccctttcctcctctccctcctgtggattctcccatcagccatctggttctcctcttaaggccagttgaagatggtcccttacagcttcccaagttaggttagtgatgtgaaatgctcctgtccctggccctacctccttccctgtccccacccctgcataaggcagttgttggttttcttccccaattcttttccaagtaggttttgtttaccctactccccaaatccctgagccagaagtggggtgcttatactcccaaaccttgagtgtccagccttcccctgttgtttttagtctcttgtgctgtgcctagtggcacctgggctggggaggacactgccccgtctaggtttttataaatgtcttactcaagttcaaacctccagcctgtgaatcaactgtgtctcttttttgacttggtaagcaagtattaggctttggggtggggggaggtctgtaatgtgaaacaacttcttgtctttttttctcccactgttgtaaataacttttaatggccaaaccccagatttgtacttttttttttttctaactgctaaaaccattctcttccacctggttttactgtaacatttggaaaaggaataaatgtcgtcccttt

SEQ ID NO: 396 - protein, 195 aa, Homo sapiens; identical to SEQ ID NO: 276

SEQ ID NO: 397 - DNA, 742 bp, Homo sapiens
  CDS (5)..(445)
acagatgaaactttttaggtctcaaagaaatctttacatttctggattttccctatttttttggctagttttgagacgtctggttacgcttattactcaactggcaaaagaactgtcaaacaaaggtgtacttaaaactcaagcagaaaatactaacaaggctgccaaaaaatttatggaagaaaacgaaaaactaaaaaggattttgaaaagccatggtaaagatgaagaatgtgttttggaagcagaaaataaaaaactagtagaagaccaggagaaactgaaaactgaattaaggaagacttcagatgccctttctaaggcacaaaatgatgtgatggaaatgaagatgcagtcagagagactttcgaaagaatatgatcaactcctgaaagaacactctgaacttcaggatcgtttagaaagaggcaacaagaaaagactgtgaactttataaaagacacttgcaatatactgtgtcaaaatgataattttgttatgttagcctctagaaaatttaagttcagaaaaatgcactatgaccggttcgtaatttttttaatgccacacataggttgtattgtaatggcattatcaaaatatttgatgatgtttcagatatattgcaaagtctgtattccagctcttaagaaaaatataagcatgttaaataccatatttacatattgataatgtcattggtatatggtggctgtttaccaataaaaggaaaaaattcatt

SEQ ID NO: 398 - protein, 147 aa, Homo sapiens
MKLFRSQRNLYISGFSLFFWLVLRRLVTLITQLAKELSNKGVLKTQAENTNKAAKKFMEENEKLKRILKSHGKDEECVLEAENKKLVEDQEKLKTELRKTSDALSKAQNDVMEMKMQSERLSKEYDQLLKEHSELQDRLERGNKKRL

SEQ ID NO: 399 - DNA, 1840 bp, Homo sapiens
  CDS (52)..(774)
gcggagcagcgcagggagccaggcgggctgccggcgggtgtgaagaaaaaaatgacactccaatgggctgcagtggcaacctttctttatgccgaaataggactcattttaatcttctgcctaccttttattcctcctcagagatggcagaagattttttcatttaatgtctggggtaaaattgcaactttttggaacaaggctttccttaccattatcatcctattgattgttctatttctagatgctgtgagagaagtaaggaaatattcctcagttcataccattgagaagagctccaccagcagacctgatgcctatgaacacacacagatgaaactttttaggtctcaaagaaatctttacatttctggattttccctatttttttggctagttttgagacgtctggttacgcttattactcaactggcaaaagaactgtcaaacaaaggtgtacttaaaactcaagcagaaaatactaacaaggctgccaaaaaatttatggaagaaaacgaaaaactaaaaaggattttgaaaagccatggtaaagatgaagaatgtgttttggaagcagaaaataaaaaactagtagaagaccaggagaaactgaaaactgaattaaggaagacttcagatgccctttctaaggcacaaaatgatgtgatggaaatgaagatgcagtcagagagactttcgaaagaatatgatcaactcctgaaagaacactctgaacttcaggatcgtttagaaagaggcaacaagaaaagactgtgaactttataaaagacacttgcaatatactgtgtcaaaatgataattttgttatgttagcctctagaaaatttaagttcagaaaaatgcactatgaccggttcgtaatttttttaatgccacacataggttgtattgtaatggcattatcaaaatatttgatgatgtttcagatatattgcaaagtctgtattccagctcttaagaaaaatataagcatgttaaataccatatttacatattgataatgtcattggtatatggtggctgtttaccaataaaaggaaaaaattcattaaccggttgcttccaaaattagaagttttaagttgcatgaaaccattaatagccttgaaagctttgataagttttcagtaataataacctatttaatcagatgatgatgtgtttgaaaatagtgttcaatatcagcaaatttgtacacagggaatgtaaataaggataactgatcagagttatccactgtatttataaggaagagtcggaaaaaacaatgaccttagttttttttaagcctgatgatactatggtttactctaataagatagctatattgataattatatttttgttactgtgcccttgcacattttggtctttttgttaatatttttattaataacacataattagtaaccactctactgtttcaagttaatctagtaatagagcttacgtatatttgtataactgctataccactgaactgaatttattttacaacagtgtagaattcttgaaaagttaacgtagaaaatatccaaaaagcagtatttctagaaagtgtccaaaaagcagtatttctttcccttggttgtgagagtaactaattatataaatattacctcaaaaatacatacactggtatcacacagtctttctacaatgtttctgtattctgaaagctaaatattaagtactatttttccattcaaatattcatttagaatttcctttagaagatggcagtgattataatattaatatgatttcatttgttccagtgtttagacatgaaatcatcttccttgtctcatgaaaaccc

SEQ ID NO: 400 - protein, 241 aa, Homo sapiens
MTLQWAAVATFLYAEIGLILIFCLPFIPPQRWQKIFSFNVWGKIATFWNKAFLTIIILLIVLFLDAVREVRKYSSVHTIEKSSTSRPDAYEHTQMKLFRSQRNLYISGFSLFFWLVLRRLVTLITQLAKELSNKGVLKTQAENTNKAAKKFMEENEKLKRILKSHGKDEECVLEAENKKLVEDQEKLKTELRKTSDALSKAQNDVMEMKMQSERLSKEYDQLLKEHSELQDRLERGNKKRL

SEQ ID NO: 401 - DNA, 1527 bp, Homo sapiens
  CDS (44)..(1399)
aaaacagagagccttgattaaggccgaacttgataatgagttaatggaaggaaaggtccagtctggtatggggctcattttgcaaggttatgagtctggctctgaagaagagggggaaattcatgaaaaggcaagaaatggaaataggtctagtactagatcttcaagtacaaaggggaaacttgaacttgtggacaataaaattactacaaagaaacgaagtaaaagcagatccaaagaacggactagacataggtctgataaaaagaaaagtaaggggggtattgaaatcgttaaagagaaaacaactaggagcaagtcaaaggagaggaaaaaatctaaaagcccatccaaaagaagtaagtctcaagatcaagcaaggaaatcaaaatcccctacccttagaaggcgatctcaagagaaaattggtaaggccagatctcctactgatgataaggttaaaattgaagataaaagtaaatcaaaagataggaaaaaatccccaattataaatgaaagtagaagtcgcgatcgaggtaaaaaatccagatccccagttgatttaagaggtaaatccaaagacagaaggtcacggtccaaagagagaaaatcaaaacggtctgaaactgataaagaaaagaagccaattaaatctccctctaaagatgcttcatctgggaaagaaaataggtcacccagcagaagacctggtcgtagtcctaaaagaagaagtttgtctccaaaaccacgtgataaatcaagaagaagcaggtctccacttttgaatgatagaagatctaagcagagcaaatccccctcgcggacactgtctcctgggagaagagccaagagccgatccttagaaagaaaacgacgagaaccagagaggagacgactttcttctccaagaacacgacctcgagatgatatcctcagtagacgtgaaagatcaaaagatgccagccccatcaatagatggtctccaacccgaagaagaagtagatctcccattagaaggaggtctcgttccccactcagacgtagcaggtctccaagaagaagaagcagatctcctcggagaagggacagaggtcggaggagcagatcacgcttgcgaaggcggtctcgatcacgcggtggtcgtagacgaaggagcagaagcaaagtaaaggaagataaatttaaaggaagtctttctgaaggaatgaaagttgagcaggaatcttcgtctgatatgcgcggcagctcttttccttcttcctccacttcccctaccctccaccgtccgggagccgccgccaccgccgccgaggagtcaggaagttcaagatggccgccgcggagacccagtcgctacgggagcagccagagatggaagatgctaattctgaaaagagtataaatgaagaaaatggagaagtatcagaagaccagtctcaaaataagcacagtcgtcacaaaaaaaagaagcataaacacagaagtaaacataagaaacataaacattcctcagaagaagacaaggat

SEQ ID NO: 402 - protein, 452 aa, Homo sapiens
MEGKVQSGMGLILQGYESGSEEEGEIHEKARNGNRSSTRSSSTKGKLELVDNKITTKKRSKSRSKERTRHRSDKKKSKGGIEIVKEKTTRSKSKERKKSKSPSKRSKSQDQARKSKSPTLRRRSQEKIGKARSPTDDKVKIEDKSKSKDRKKSPIINESRSRDRGKKSRSPVDLRGKSKDRRSRSKERKSKRSETDKEKKPIKSPSKDASSGKENRSPSRRPGRSPKRRSLSPKPRDKSRRSRSPLLNDRRSKQSKSPSRTLSPGRRAKSRSLERKRREPERRRLSSPRTRPRDDILSRRERSKDASPINRWSPTRRRSRSPIRRRSRSPLRRSRSPRRRSRSPRRRDRGRRSRSRLRRRSRSRGGRRRRSRSKVKEDKFKGSLSEGMKVEQESSSDMRGSSFPSSSTSPTLHRPGAAATAAEESGSSRWPPRRPSRYGSSQRWKMLILKRV

SEQ ID NO: 403 - DNA, 1554 bp, Homo sapiens
  CDS (173)..(682)
ggaggagagccgtgcgcagcggcgtatgtggggccgtgtgcagacccgcgtgtggcgcaggcaaggaccctcaaaataaacagcctctaccttgcgagccgtcttccccaggcctgcgtccgagtctccgccgctgcgggcccgctccgacgcggaagatctgactgcagccatgagcagcaatgagtgcttcaagtgtggacgatctggccactgggcccgggaatgtcctactggtggaggccgtggtcgtggaatgagaagccgtggcagaggtttccagtttgtttcctcgtctcttccagatatttgttatcgctgtggtgagtctggtcatcttgccaaggattgtgatcttcaggaggatgcctgctataactgcggtagaggtggccacattgccaaggactgcaaggagcccaagagagagcgagagcaatgctgctacaactgtggcaaaccaggccatctggctcgtgactgcgaccatgcagatgagcagaaatgctattcttgtggagaattcggacacattcaaaaagactgcaccaaagtgaagtgctataggtgtggtgaaactggtcatgtagccatcaactgcagcaagacaagtgaagtcaactgttaccgctgtggcgagtcagggcaccttgcacgggaatgcacaattgaggctacagcctaattattttcctttgtcgcccctcctttttctgattgatggttgtattattttctctgaatcctcttcactggccaaaggttggcagatagaggcaactcccaggccagtgagctttacttgccgtgtaaaaggaggaaaggggtggaaaaaaaccgactttctgcatttaactacaaaaaaagtttatgtttagtttggtagaggtgttatgtataatgctttgttaaagaaccccctttccgtgccactggtgaatagggattgatgaatgggaagagttgagtcagaccagtaagcccgtcctgggttccttgaacatgttcccatgtaggaggtaaaaccaattctggaagtgtctatgaacttccataaataactttaattttagtataatgatggtcttggattgtctgacctcagtagctattaaataacatcaagtaacatctgtatcaggccctacatagaacatacagttgagtgggagtaaacaaaaagataaacatgcgtgttaatggctgttcgagagaaatcggaataaaagcctaaacaggaacaacttcatcacagtgttgatgttggacacatagatggtgatggcaaaggtttagaacacattattttcaaagactaaatctaaaacccagagtaaacatcaatgctcagagttagcataatttggagctattcaggaattgcagagaaatgcattttcacagaaatcaagatgttatttttgtatactatatcacttagacaactgtgtttcatttgctgtaatcagtttttaaaagtcagatggaaagagcaactgaagtcctagaaaatagaaatgtaattttaaactattccaataaagctggaggaag

SEQ ID NO: 404 - protein, 170 aa, Homo sapiens
MSSNECFKCGRSGHWARECPTGGGRGRGMRSRGRGFQFVSSSLPDICYRCGESGHLAKDCDLQEDACYNCGRGGHIAKDCKEPKREREQCCYNCGKPGHLARDCDHADEQKCYSCGEFGHIQKDCTKVKCYRCGETGHVAINCSKTSEVNCYRCGESGHLARECTIEATA

SEQ ID NO: 405 - DNA, 1469 bp, Homo sapiens
  CDS (197)..(637)
gcacactcgcgcacactcgcgctcgggcgcacacggagcagggaccggcgcccggagcgagccagggagcggctaaccggggacccaccgcgcggagccagcctagctgccagcgagcccaacccgcgacgacccacgcccctgagccccgcagccgacccctgccggccggtgtccccaccgccatccctgacccatggcgctgaagaggattcagaaagaattgagtgatctacagcgcgatccacctgctcactgttcagctggacctgtgggagatgacttgttccactggcaagccactattatggggcctcctgatagcgcatatcaaggtggagtcttctttctcactgtacattttccgacagattatccttttaaaccaccaaagattgctttcacaacaaaaatttaccatccaaacataaacagtaatggaagtatttgtctcgatattctgaggtcacaatggtcaccagctctgactgtatcaaaagttttattgtccatatgttctctactttgtgatcctaatccagatgaccccttagtaccagatattgcacaaatctataaatcagacaaagaaaaatacaacagacatgcaagagaatggactcagaaatatgcaatgtaaaaatcaaaaacattttcatatataccagagtactgtaaaatctaggtttttttcaacattagcagtaaattgagcactgtttactgtttcattgtaccatgaaaccatttgatttttacccattttaaatgtgtttctgaagcaagacaaaacaaacttccaaaaatacccttaagactgtgatgagagcatttatcattttgtatgcattgagaaagacatttattatggtttttaagatacttggacatctgcatcttcagcttacaagatctacaatgcagctgaaaagcaaccaaattattttttgctgaaactagatgtttttacatgagaaatactgtatgtgttgtctaagatgtcagttttataaatctgtattcagatttcattctttgttagctcactttataatttgtatttttttactgtatagactaaatatattctatttacatgtatgtcaactcattacttttttcctgtgaacagtattgaaaaaccccaacggctgataattaagtgaattaactgtgtctcccttgtcttaggatattctgtagattgattgcagatttcttaaatctgaaatgatctttacactgtaattctcagcatactgattatggagaaacacttgttttgattttgttatacttgacttaactttattgcaatgtgaattaattgcactgctaagtaggaagatgtgtaacttttatttgttgctattcacatttgaattttttcctgtataggcaatattatattgacaccttttacagatcttactgtagctttttccatataaataaaatgctttttctac

SEQ ID NO: 406 - protein, 147 aa, Homo sapiens; identical to SEQ ID NO: 292

SEQ ID NO: 407 - DNA, 2009 bp, Homo sapiens
  CDS (278)..(718)
aagaaggtgctgttccgagaagaaggaaaagggcttgacacgtattcactcggccccggacgtgggaagcaagccgtctggcttcggcctcacatcggtcttgtgctcgggacggcggcgttggcggactgatccgcggcggtgaagaggcgcctgtgtctggcagagctggtgtgagacgagacaatcctgccccgccgccgggataatcaagagttttggccggacctttgagcatacaccgagagagtgaggagccagacgacaagcacacactatggcgctgaaacggattaataaggaacttagtgatttggcccgtgaccctccagcacaatgttctgcaggtccagttggggatgatatgtttcattggcaagccacaattatgggacctaatgacagcccatatcaaggcggtgtattctttttgacaattcattttcctacagactaccccttcaaaccacctaaggttgcatttacaacaagaatttatcatccaaatattaacagtaatggcagcatttgtctcgatattctaagatcacagtggtcgcctgctttaacaatttctaaagttcttttatccatttgttcactgctatgtgatccaaacccagatgaccccctagtgccagagattgcacggatctataaaacagacagagataagtacaacagaatatctcgggaatggactcagaagtatgccatgtgatgctaccttaaagtcagaataacctgcattatagctggaataaactttaaattactgttccttttttgattttcttatccggctgctcccctatcagacctcatcttttttaattttattttttgtttacctccctccattcattcacatgctcatctgagaagacttaagttcttccagctttggacaataactgcttttagaaactgtaaagtagttacaagagaacagttgcccaagactcagaatttttaaaaaaaaaaatggagcatgtgtattatgtggccaatgtcttcactctaacttggttatgagactaaaaccattcctcactgctctaacatgctgaagaaatcatctgagggggagggagatggatgctcagttgtcacatcaaaggatacagcattattctagcagcatccattcttgtttaagccttccactgttagagatttgaggttacatgatatgctttatgctcataactgatgtggctggagaattggtattgaatttatagcatcagcagaacagaaaatgtgatgtattttatgcatgtcaataaaggaatgacctgttcttgttctacagagaatggaaattggaagtcaaacaccctttgtattccaaaatagggtctcaaacattttgtaattttcatttaaattgttaggaggcttggagctattagttaatctatcttccaatacactgtttaatatagcactgaataaatgatgcaagttgtcaatggatgagtgatcaactaatagctctgctagtaattgatttatttttcttcaataaagttgcataaaccaatgagttagctgcctggattaatcagtatgggaaacaatcttttgtaaatgcaaagctgttttttgtatatactgttgggatttgcttcattgtttgacatcaaatgatgatgtaaagttcgaaagagtgaatattttgccatgttcagttaaagtgcacagtctgttacaggttgacacattgcttgacctgatttatgcagaattaataagctatttggatagtgtagctttaatgtgctgcacatgatactggcagccctagagttcatagatggacttttgggacccagcagttttgaaatgtgtttatggagtttaagaaatttattttccaggtgcagcccctgtctaactgaaatttctcttcaccttgtacacttgacagctgaaaaaaaacaacatgggagtaataatgggtcaaaatttgcaaaataaagtactgttttggtgtgggagttgtc

SEQ ID NO: 408 - protein, 147 aa, Homo sapiens; identical to SEQ ID NO: 294

SEQ ID NO: 409 - DNA, 842 bp, Homo sapiens
  CDS (46)..(822)
cttaacatggagccggcggaaggggtggtgtagggccgggcgataatggcggcgtcgaggctggagctaaacctggtgcggctgctatcccgctgcgaggcgatggcagcggagaaacgggacccggacgtgtggcgcctggagaagtacgtgggagccctagaggacatgttgcaggccctgaaggtccacgcgagcaaaccggcctctgaggtgatcaatgaatattcctggaaggtggattttctgaaggggatgctgcaagccgagaagctgacctcctcctcagagaaagcactggccaaccagttcctggcccctggccgtgtgccaaccacagccagagagcgagtgcccgccacaaagacggtgcatctgcagtcacgggcgcggtacaccagcgagatgcggagtgagctactaggcacggactctgcagagcctgagatggacgtaaggaagagaactggagtggcagggtcccagccagtgggtgagaagcagtcggcagctgagctagacctcgtcctgcagcgacatcagaacctccaggaaaagctggcggaagagatgctaggactggcccggagcctcaagaccaataccctggccgcccagagtgtcatcaagaaggacaaccagaccctgtcacactcactgaaaatggcggaccagaacctggagaaactgaagacggagtcagagcgtctggagcagcacacgcagaagtcagtcaactggctgctctgggccatgctcattatcgtctgcttcatcttcattagcatgatcctcttcattcgaatcatgcctaaactcaaataaagacccccgcccacctt

SEQ ID NO: 410 - protein, 259 aa, Homo sapiens
MAASRLELNLVRLLSRCEAMAAEKRDPDVWRLEKYVGALEDMLQALKVHASKPASEVINEYSWKVDFLKGMLQAEKLTSSSEKALANQFLAPGRVPTTARERVPATKTVHLQSRARYTSEMRSELLGTDSAEPEMDVRKRTGVAGSQPVGEKQSAAELDLVLQRHQNLQEKLAEEMLGLARSLKTNTLAAQSVIKKDNQTLSHSLKMADQNLEKLKTESERLEQHTQKSVNWLLWAMLIIVCFIFISMILFIRIMPKLK

SEQ ID NO: 411 - DNA, 755 bp, Homo sapiens
  CDS (132)..(548)
aacgaaggcgattactcagtgttaacatccgcgttagagctgatttacgagataattattctccaggttggaaattcaatcactgggagctcaagggagttcccattagacttgaagttgggccacgtgatatgaagagctgtcagtttgtagccgtcagacgagatactggagaaaagctgacagttgctgaaaatgaggcagagactaaacttcaagctattttggaagacatccaggtcacccttttcacaagggcttctgaagaccttaagactcatatggttgtggctaatacaatggaagactttcagaagatactagattctggaaagattgttcagattccattctgtggggaaattgactgtgaggactggatcaaaaagaccactgccagggatcaagatcttgaacctggtgctccatccatgggagctaaaagcctttgcatccccttcaaaccactctgtgaactgcagcctggagccaaatgtgtctgtggcaagaaccctgccaagtactacaccttatttggtcgcagctactgagggatgaacgaaagccccctcttcaactcctctcactttttaaagcattgatattagtatcttctcagatacagaccgttttatgattttttaaaaagtaaaagttctaaaatgaagtcacacaggacaattattcttatgcctaagttaacagtggataaaagacttttctgtaaacaactccagtaataaatatcatgaact

SEQ ID NO: 412 - protein, 139 aa, Homo sapiens [sequence omitted]

SEQ ID NO: 413 - DNA, 1344 bp, Homo sapiens
  CDS (25)..(1014)
gaggaggccgcgccagtgacagcgatggcggcggagtcggcgctccaagttgtggagaagctgcaggcgcgcctggccgcgaacccggaccctaagaagctattgaaatatttgaagaaactctccaccctgcctattacagtagacattcttgcggagactggggttgggaaaacagtaaatagcttgcgaaaacacgagcatgttggaagctttgccagggacctagtggcccagtggaagaagctggttcctgtggaacgaaatgctgagcctgatgaacaggactttgagaagagcaattcccgaaagcgccctcgggatgccctgcagaaggaggaggagatggagggggactaccaagaaacctggaaagccacggggagccgatcctatagccctgaccacaggcagaagaaacataggaaactctcggagctcgagagacctcacaaagtgtctcacggtcatgagaggagagatgagagaaagaggtgtcacagaatgtcaccaacttactcttcagaccctgagtcttctgattatggccatgttcaatcccctccatcttgtaccagtcctcatcagatgtacgtcgaccactacagatccctggaggaggaccaggagcccattgtttcacaccagaagcctgggaaaggccacagcaatgcctttcaggacagactcggggccagccaagaacgacacctgggtgaaccccatgggaaaggggttgtgagtcaaaacaaggagcacaaatcttcccacaaggacaaacgccccgtggatgccaagagtgatgagaaggcctctgtggtgagcagagagaaatcacacaaggccctctccaaagaggagccggcctatgatggcccaagcaccagcagtgcccacttggcaccagtggtcagcagcactgtttcctatgatcctaggaaacccactgtgaagaaaattgccccaatgatggccaagacaattaaagctttcaagaacagattctcccgacgataaactgaggacttgccttggaaatggaatctggggaggcaggaatacaaggacagtgggggttggggaatggaattctacaggagactggagtcttgctttgtggatccttttggtctccgagtcctgcagtctgcaggtgctgcccctgggaacctgcgtgccacagccccgcctccctgcctggagcacactttagaattctgaagatgtgaagcctctgtctcactgaggattttaaaggtcaattatacttttgttgttcattagcatctttgtaaactataagacgtagttttaattaataaatattgcccccagattgtattt

SEQ ID NO: 414 - protein, 330 aa, Homo sapiens
MAAESALQVVEKLQARLAANPDPKKLLKYLKKLSTLPITVDILAETGVGKTVNSLRKHEHVGSFARDLVAQWKKLVPVERNAEPDEQDFEKSNSRKRPRDALQKEEEMEGDYQETWKATGSRSYSPDHRQKKHRKLSELERPHKVSHGHERRDERKRCHRMSPTYSSDPESSDYGHVQSPPSCTSPHQMYVDHYRSLEEDQEPIVSHQKPGKGHSNAFQDRLGASQERHLGEPHGKGVVSQNKEHKSSHKDKRPVDAKSDEKASVVSREKSHKALSKEEPAYDGPSTSSAHLAPVVSSTVSYDPRKPTVKKIAPMMAKTIKAFKNRFSRR

SEQ ID NO: 415 - DNA, 1963 bp, Homo sapiens
  CDS (123)..(1961)
agctttccgagtgccaggcgccggccggctgcgaagacgcggtgggccgcccctccgattgaaatcacagaagatattcgtgttcttcttaagagaaaaagaggacatttaagaaaaacgctatggcaaagagaataaaagctaagcccacttcagacaaacctggaagtccatatcgctctgtcacacacttcgactcactagctgtaatagacatccctggagcagatactctggataaattatttgaccatgctgtatccaagtttgggaagaaggacagccttgggaccagggaaatcctaagtgaagaaaatgaaatgcagccaaatggaaaagtttttaagaagttaattcttgggaattataaatggatgaactatcttgaagtgaatcgcagagtgaataactttggtagtggactcactgcactgggactaaaaccaaagaacaccattgccatcttctgtgagaccagggccgaatggatgattgcagcacagacctgctttaagtacaactttcctcttgtgactttatatgccacacttggcaaagaagcagtagttcatgggctaaatgaatctgaggcttcctatctgattaccagtgttgaacttctggaaagtaaacttaagactgcattgttagatatcagttgtgttaaacatatcatttatgtggacaataaggctatcaataaagcagagtaccctgaaggatttgagattcacagcatgcaatcagtagaagagttgggatctaacccagaaaacttgggcattcctccaagtagaccaacgccttcagacatggccattgttatgtatactagtggttctactggccgacctaagggagtgatgatgcatcatagcaatttgatagctggaatgacaggccagtgtgaaagaatacctggactgggaccgaaggacacatatattggctacttgcctttggctcatgtgctagaactgacagcagagatatcttgctttacctatggctgcaggattggatattcttctccgcttacactctctgaccagtccagcaaaattaaaaaaggaagcaaaggagactgtactgtactgaagcccacacttatggctgctgttccggaaatcatggatagaatttataagaatgttatgagcaaagtccaagagatgaattatattcagaaaactctgttcaagatagggtatgattacaaattggaacagatcaaaaagggatatgatgcacctctttgcaatctgttactgtttaaaaaggtcaaggccctgctgggagggaatgtccgcatgatgctgtctggaggggccccgctatctcctcagacacaccgattcatgaatgtctgcttctgctgcccaattggccagggttatggactgacagaatcatgtggtgctgggacagttactgaagtaactgactatactactggcagagttggagcacctcttatttgctgtgaaattaagctaaaagactggcaagaaggcggttatacaattaatgacaagccaaaccccagaggtgaaatcgtaattggtggacagaacatctccatgggatattttaaaaatgaagagaaaacagcagaagattattctgtggatgaaaatggacaaaggtggttttgcactggtgatattggagaattccatcccgatggatgtttacagattatagatcgtaagaaagatctagtgaagttacaagcaggagagtatgtatctcttgggaaagtagaagctgcactgaagaattgtccacttattgacaacatctgtgcttttgccaaaagtgatcagtcctatgtgatcagttttgtggttcctaaccagaaaaggttgacacttttggcacaacagaaaggggtagaaggaacttgggttgatatctgcaataatcctgctatggaagctgaaatactgaaagaaagcaaatt

SEQ ID NO: 416 - protein, 613 aa, Homo sapiens
MAKRIKAKPTSDKPGSPYRSVTHFDSLAVIDIPGADTLDKLFDHAVSKFGKKDSLGTREILSEENEMQPNGKVFKKLILGNYKWMNYLEVNRRVNNFGSGLTALGLKPKNTIAIFCETRAEWMIAAQTCFKYNFPLVTLYATLGKEAVVHGLNESEASYLITSVELLESKLKTALLDISCVKHIIYVDNKAINKAEYPEGFEIHSMQSVEELGSNPENLGIPPSRPTPSDMAIVMYTSGSTGRPKGVMMHHSNLIAGMTGQCERIPGLGPKDTYIGYLPLAHVLELTAEISCFTYGCRIGYSSPLTLSDQSSKIKKGSKGDCTVLKPTLMAAVPEIMDRIYKNVMSKVQEMNYIQKTLFKIGYDYKLEQIKKGYDAPLCNLLLFKKVKALLGGNVRMMLSGGAPLSPQTHRFMNVCFCCPIGQGYGLTESCGAGTVTEVTDYTTGRVGAPLICCEIKLKDWQEGGYTINDKPNPRGEIVIGGQNISMGYFKNEEKTAEDYSVDENGQRWFCTGDIGEFHPDGCLQIIDRKKDLVKLQAGEYVSLGKVEAALKNCPLIDNICAFAKSDQSYVISFVVPNQKRLTLLAQQKGVEGTWVDICNNPAMEAEILKESK

SEQ ID NO: 417 - DNA, 815 bp, Homo sapiens
  CDS (69)..(632)
attcctcccagggaccccagacctctgtctctctcggcaggccttggctccttgaacttttggccgccatgtacttcccgaaggtcctctctgatgacatgaagaagctgaaggcccgaatgcaccaggccatagaaagattttatgataaaatgcaaaatgcagaatcaggacgtggacaggtgatgtcgagcctggcagagctggaggacgacttcaaagagggctacctggagacagtggcggcttattatgaggagcagcacccagagctcactcctctacttgaaaaagaaagagatggattacggtgccgaggcaacagatcccctgtcccggatgttgaggatcccgcaaccgaggagcctggggagagcttttgtgacaaggtcatgagatggttccaggccatgctgcagcggctgcagacctggtggcacggggttctggcctgggtgaaggagaaggtggtggccctggtccatgcagtgcaggccctctggaaacagttccagagtttctgctgctctctgtcagagctcttcatgtcctctttccagtcctacggagccccacggggggacaaggaggagctgacaccccagaagtgctctgaaccccaatcctcaaaatgaagatactgacaccacctttgccctccccgtcaccgcgcacccaccctgacccctccctcagctgtcctgtgccccgccctctcccgcacactcagtccccctgcctggcgttcctgccgcagctctgacctggtgctgtcgccctggcatcttaataaaacctgcttatacttccctggc

SEQ ID NO: 418 - protein, 188 aa, Homo sapiens
MYFPKVLSDDMKKLKARMHQAIERFYDKMQNAESGRGQVMSSLAELEDDFKEGYLETVAAYYEEQHPELTPLLEKERDGLRCRGNRSPVPDVEDPATEEPGESFCDKVMRWFQAMLQRLQTWWHGVLAWVKEKVVALVHAVQALWKQFQSFCCSLSELFMSSFQSYGAPRGDKEELTPQKCSEPQSSK

SEQ ID NO: 419 - DNA, 815 bp, Homo sapiens
  CDS (69)..(632)
attcctcccagggaccccagacctctgtctctctcggcaggccttggctccttgaacttttggccgccatgtgcttcccgaaggtcctctctgatgacatgaagaagctgaaggcccgaatgcaccaggccatagaaagattttatgataaaatgcaaaatgcagaatcaggacgtggacaggtgatgtcgagcctggcagagctggaggacgacttcaaagagggctacctggagacagtggcggcttattatgaggagcagcacccagagctcactcctctacttgaaaaagaaagagatggattacggtgccgaggcaacagatcccctgtcccggatgttgaggatcccgcaaccgaggagcctggggagagcttttgtgacaaggtcatgagatggttccaggccatgctgcagcggctgcagacctggtggcacggggttctggcctgggtgaaggagaaggtggtggccctggtccatgcagtgcaggccctctggaaacagttccagagtttctgctgctctctgtcagagctcttcatgtcctctttccagtcctacggagccccacggggggacaaggaggagctgacaccccagaagtgctctgaaccccaatcctcaaaatgaagatactgacaccacctttgccctccccgtcaccgcgcacccaccctgacccctccctcagctgtcctgtgccccgccctctcccgcacactcagtccccctgcctggcgttcctgccgcagctctgacctggtgctgtcgccctggcatcttaataaaacctgcttatacttccctggc

SEQ ID NO: 420 - protein, 188 aa, Homo sapiens
MCFPKVLSDDMKKLKARMHQAIERFYDKMQNAESGRGQVMSSLAELEDDFKEGYLETVAAYYEEQHPELTPLLEKERDGLRCRGNRSPVPDVEDPATEEPGESFCDKVMRWFQAMLQRLQTWWHGVLAWVKEKVVALVHAVQALWKQFQSFCCSLSELFMSSFQSYGAPRGDKEELTPQKCSEPQSSK

SEQ ID NO: 421 - DNA, 1120 bp, Homo sapiens
  CDS (221)..(922)
ggcacgaggccccagccagctgtcccgagtctggactttccctctgcccctccccactctcaggctggtggggtggggaaagcagcccattcctgggctcagagactcccaccccagctcagagggagcaggggcccagccagggacggaccctcattcctcccagggaccccagacctctgtctctctcgggccttggctccttgaacttttggccgccatgtgcttcccgaaggtcctctctgatgacatgaagaagctgaaggcccgaatggtaatgctcctccctacttctgctcaggggttgggggcctgggtctcagcgtgtgacactgaggacactgtgggacacctgggaccctggagggacaaggatccggccctttggtgccaactctgcctctcttcacagcaccaggccatagaaagattttatgataaaatgcaaaatgcagaatcaggacgtggacaggtgatgtcgagcctggcagagctggaggacgacttcaaagagggctacctggagacagtggcggcttattatgaggagcagcacccagagctcactcctctacttgaaaaagaaagagatggattacggtgccgaggcaacagatcccctgtcccggatgttgaggatcccgcaaccgaggagcctggggagagcttttgtgacaaggtcatgagatggttccaggccatgctgcagcggctgcagacctggtggcacggggttctggcctgggtgaaggagaaggtggtggccctggtccatgcagtgcaggccctctggaaacagttccagagtttctgctgctctctgtcagagctcttcatgtcctctttccagtcctacggagccccacggggggacaaggaggagctgacaccccagaagtgctctgaaccccaatcctcaaaatgaagatactgacaccacctttgccctccccgtcaccgcgcacccaccctgacccctccctcagctgtcctgtgccccgccctctcccgcacactcagtccccctgcctggcgttcctgccgcagctctgacctggtgctgtcgccctggcatcttaataaaacctgcttatacttccctggcaggggagataccctg

SEQ ID NO: 422 - protein, 234 aa, Homo sapiens
MCFPKVLSDDMKKLKARMVMLLPTSAQGLGAWVSACDTEDTVGHLGPWRDKDPALWCQLCLSSQHQAIERFYDKMQNAESGRGQVMSSLAELEDDFKEGYLETVAAYYEEQHPELTPLLEKERDGLRCRGNRSPVPDVEDPATEEPGESFCDKVMRWFQAMLQRLQTWWHGVLAWVKEKVVALVHAVQALWKQFQSFCCSLSELFMSSFQSYGAPRGDKEELTPQKCSEPQSSK

SEQ ID NO: 423 - DNA, 1455 bp, Homo sapiens
  CDS (83)..(709)
aaaaaaaaagctgggagccgccgcccccgcagctgctgccgccgccgccagggcccggactcggacgcgtggtagccccaggatgggtgagttcaacgagaagaagacaacatgtggcaccgtttgcctcaagtacctgctgtttacctacaattgctgcttctggctggctggcctggctgtcatggcagtgggcatctggacgctggccctcaagagtgactacatcagcctgctggcctcaggcacctacctggccacagcctacatcctggtggtggcgggcactgtcgtcatggtgactggggtcttgggctgctgcgccaccttcaaggagcgtcggaacctgctgcgcctgtacttcatcctgctcctcatcatctttctgctggagatcatcgctggtatcctcgcctacgcctactaccagcagctgaacacggagctcaaggagaacctgaaggacaccatgaccaagcgctaccaccagccgggccatgaggctgtgaccagcgctgtggcagcaacaactcacaggactggcgagacagtgagtggatccgctcacaggaggccggtggccgtgtggtcccagacagctgctgcaagacggtggtggctctttgtgggcagcgagaccatgcctccaacatctacaaggtggagggcggctgcatcaccaagttggagaccttcatccaggagcacctgagggtcattggggctgtggggatcggcattgcctgtgtgcaggtctttggcatgatcttcacgtgctgcctgtacaggagtctcaagctggagcactactgaccctgccttgggccttgctgctgctgcacccaactactgagctgagaccactgagtaccaggggctgggctccctgatgacacccaccctgtgccatcaccataacctctggggaccccaacctcagaggcagcttcaagtgccttttgctgcgcaccaatgcccagcaggggaggtgaggggggctggcggggcgaagtttggggggtgttttgtggggctccccagacacactctctgcctggtggtcagatgcaggttggaaggggccttgctgagtggcgcaaggccgagcgttcccagcagggggagaaacccttcacaccccaggcccttcaggaactggggccttgccttgcagccacatggccccatcccagttggggaagccaggtgagctctgacccttgggcctgggcctctgcccctcccaacccagccctcgtctccctcgacagcgcccctgctgtcttccccaccgcagtcaccaccacccgaaatgccacgtggtcactgtgcactgccctgtccatgtgcctctgcggggcagggccttcctggttttgttcactgctgtacccagatgcctacaaccatccctgccacatacaggtgctcaataaacacttgtagagcagatgg

SEQ ID NO: 424 - protein, 209 aa, Homo sapiens
MGEFNEKKTTCGTVCLKYLLFTYNCCFWLAGLAVMAVGIWTLALKSDYISLLASGTYLATAYILVVAGTVVMVTGVLGCCATFKERRNLLRLYFILLLIIFLLEIIAGILAYAYYQQLNTELKENLKDTMTKRYHQPGHEAVTSAVAATTHRTGETVSGSAHRRPVAVWSQTAAARRWWLFVGSETMPPTSTRWRAAASPSWRPSSRST

SEQ ID NO: 425 - DNA, 1722 bp, Homo sapiens
  CDS (40)..(1542)
gtgctaggaataagagttattatatttaccaggattactatgctgaaggtattcttcaagagtttgttttttttctactggttgatctctacttttagaaggaaatttggtgagcggcctccacctaaacgacttactagggaagctatgcgaaattatttaaaagagcgaggggatcaaacagtacttattcttcatgcaaaagttgcacagaagtcatatggaaatgaaaaaaggtttttttgcccacctccttgtgtatatcttatgggcagcggatggaagaaaaaaaaagaacaaatggaacgcgatggttgttctgaacaagagtctcaaccgtgtgcatttattgggataggaaatagtgaccaagaaatgcagcagctaaacttggaaggaaagaactattgcacagccaaaacattgtatatatctgactcagacaagcgaaagcacttcatgttgtctgtaaagatgttctatggcaacagtgatgacattggtgtgttcctcagcaagcggataaaagtcatctccaaaccttccaaaaagaagcagtcattgaaaaatgctgacttatgcattgcctcaggaacaaaggtggctctgtttaatcgactacgatcccagacagttagtaccagatacttgcatgtagaaggaggtaattttcatgccagttcacagcagtggggagccttttttattcatctcttggatgatgatgaatcagaaggagaagaattcacagtccgagatggctacatccattatggacaaacagtcaaacttgtgtgctcagttactggcatggcactcccaagattgataattaggaaagttgataagcagaccgcattattggatgcagatgatcctgtgtcacaactccataaatgtgcattttaccttaaggatacagaaagaatgtatttgtgcctttctcaagaaagaataattcaatttcaggccactccatgtccaaaagaaccaaataaagagatgataaatgatggcgcttcctggacaatcattagcacagataaggcagagtatacattttatgagggaatgggccctgtccttgccccagtcactcctgtgcctgtggtagagagccttcagttgaatggcggtggggacgtagcaatgcttgaacttacaggacagaatttcactccaaatttacgagtgtggtttggggatgtagaagctgaaactatgtacaggtgtggagagagtatgctctgtgtcgtcccagacatttctgcattccgagaaggttggagatgggtccggcaaccagtccaggttccagtaactttggtccgaaatgatggaatcatttattccaccagccttacctttacctacacaccagaaccagggccgcggccacattgcagtgcagcaggagcaatccttcgagccaattcaagccaggtgccccctaacgaatcaaacacaaacagcgagggaagttacacaaacgccagcacaaattcaaccagtgtcacatcatctacagccacagtggtatcctaactaccgtctttttgctaggacttaaactgacttgagtgtggcaaaaagttaacaaaaaaggagaaaaaatgaacaatcgtttgtggtttcttgggaaaacttttcataccaggtgatactattcaaaaaccccgttgtctccctgcaagtgctgatttgaaatgcagaagccccagt

SEQ ID NO: 426 - protein, 501 aa, Homo sapiens
MLKVFFKSLFFFYWLISTFRRKFGERPPPKRLTREAMRNYLKERGDQTVLILHAKVAQKSYGNEKRFFCPPPCVYLMGSGWKKKKEQMERDGCSEQESQPCAFIGIGNSDQEMQQLNLEGKNYCTAKTLYISDSDKRKHFMLSVKMFYGNSDDIGVFLSKRIKVISKPSKKKQSLKNADLCIASGTKVALFNRLRSQTVSTRYLHVEGGNFHASSQQWGAFFIHLLDDDESEGEEFTVRDGYIHYGQTVKLVCSVTGMALPRLIIRKVDKQTALLDADDPVSQLHKCAFYLKDTERMYLCLSQERIIQFQATPCPKEPNKEMINDGASWTIISTDKAEYTFYEGMGPVLAPVTPVPVVESLQLNGGGDVAMLELTGQNFTPNLRVWFGDVEAETMYRCGESMLCVVPDISAFREGWRWVRQPVQVPVTLVRNDGIIYSTSLTFTYTPEPGPRPHCSAAGAILRANSSQVPPNESNTNSEGSYTNASTNSTSVTSSTATVVS

SEQ ID NO: 427 - DNA, 1722 bp, Homo sapiens
  CDS (40)..(1542)
gtgctaggaataagagttattatatttaccaggattactatgctgaaggtattcttcaagagtgtgttttttttctactggttgatctctacttttagaaggaaatttggtgagcggcctccacctaaacgacttactagggaagctatgcgaaattatttaaaagagcgaggggatcaaacagtacttattcttcatgcaaaagttgcacagaagtcatatggaaatgaaaaaaggtttttttgcccacctccttgtgtatatcttatgggcagcggatggaagaaaaaaaaagaacaaatggaacgcgatggttgttctgaacaagagtctcaaccgtgtgcatttattgggataggaaatagtgaccaagaaatgcagcagctaaacttggaaggaaagaactattgcacagccaaaacattgtatatatctgactcagacaagcgaaagcacttcatgttgtctgtaaagatgttctatggcaacagtgatgacattggtgtgttcctcagcaagcggataaaagtcatctccaaaccttccaaaaagaagcagtcattgaaaaatgctgacttatgcattgcctcaggaacaaaggtggctctgtttaatcgactacgatcccagacagttagtaccagatacttgcatgtagaaggaggtaattttcatgccagttcacagcagtggggagccttttttattcatctcttggatgatgatgaatcagaaggagaagaattcacagtccgagatggctacatccattatggacaaacagtcaaacttgtgtgctcagttactggcatggcactcccaagattgataattaggaaagttgataagcagaccgcattattggatgcagatgatcctgtgtcacaactccataaatgtgcattttaccttaaggatacagaaagaatgtatttgtgcctttctcaagaaagaataattcaatttcaggccactccatgtccaaaagaaccaaataaagagatgataaatgatggcgcttcctggacaatcattagcacagataaggcagagtatacattttatgagggaatgggccctgtccttgccccagtcactcctgtgcctgtggtagagagccttcagttgaatggcggtggggacgtagcaatgcttgaacttacaggacagaatttcactccaaatttacgagtgtggtttggggatgtagaagctgaaactatgtacaggtgtggagagagtatgctctgtgtcgtcccagacatttctgcattccgagaaggttggagatgggtccggcaaccagtccaggttccagtaactttggtccgaaatgatggaatcatttattccaccagccttacctttacctacacaccagaaccagggccgcggccacattgcagtgcagcaggagcaatccttcgagccaattcaagccaggtgccccctaacgaatcaaacacaaacagcgagggaagttacacaaacgccagcacaaattcaaccagtgtcacatcatctacagccacagtggtatcctaactaccgtctttttgctaggacttaaactgacttgagtgtggcaaaaagttaacaaaaaaggagaaaaaatgaacaatcgtttgtggtttcttgggaaaacttttcataccaggtgatactattcaaaaaccccgttgtctccctgcaagtgctgatttgaaatgcagaagccccagt

SEQ ID NO: 428 - protein, 501 aa, Homo sapiens
MLKVFFKSVFFFYWLISTFRRKFGERPPPKRLTREAMRNYLKERGDQTVLILHAKVAQKSYGNEKRFFCPPPCVYLMGSGWKKKKEQMERDGCSEQESQPCAFIGIGNSDQEMQQLNLEGKNYCTAKTLYISDSDKRKHFMLSVKMFYGNSDDIGVFLSKRIKVISKPSKKKQSLKNADLCIASGTKVALFNRLRSQTVSTRYLHVEGGNFHASSQQWGAFFIHLLDDDESEGEEFTVRDGYIHYGQTVKLVCSVTGMALPRLIIRKVDKQTALLDADDPVSQLHKCAFYLKDTERMYLCLSQERIIQFQATPCPKEPNKEMINDGASWTIISTDKAEYTFYEGMGPVLAPVTPVPVVESLQLNGGGDVAMLELTGQNFTPNLRVWFGDVEAETMYRCGESMLCVVPDISAFREGWRWVRQPVQVPVTLVRNDGIIYSTSLTFTYTPEPGPRPHCSAAGAILRANSSQVPPNESNTNSEGSYTNASTNSTSVTSSTATVVS

SEQ ID NO: 429 - DNA, 1641 bp, Homo sapiens
  CDS (88)..(1350)
gctggactcccgtgtccctccgcgcaggcgggcggccccggagcgctggtgccggcagaggcggcgacggtggcgcccctcctcatcatgaacagaggcttctcccgaaaaagccacacattcctgcccaagatcttcttccgcaagatgtcatcctcaggggccaaggacaagcctgagctgcagtttcccttccttcaggatgaggacacagtggccacgctgctagagtgcaagacgctcttcatcttgcgcggcctgccaggaagcggcaagtccacgctggcacgggtcatcgtggacaagtaccgtgatggcaccaagatggtgtcggctgacgcttacaagatcacccccggcgctcgaggagccttctccgaggagtacaagcggctcgatgaggacctggctgcctactgccgccgccgggacatcagaattcttgtgcttgatgacaccaaccacgaacgggaacggctggagcagctctttgaaatggccgaccagtaccagtaccaggtggtgctggtggagcccaagacggcgtggcggctggactgtgcccagctcaaggagaagaaccagtggcagctgtcggctgatgacctgaagaagctgaagcctgggctggagaaggacttcctgccgctctacttcggctggttcctgaccaagaagagctctgagaccctccgcaaagccggccaggtcttcctggaagagctggggaaccacaaggccttcaagaaggagctgcgacaattcgtccctggggatgagcccagggagaagatggacttggtcacctactttggaaagagacccccaggcgtgctgcattgcacaaccaagttttgtgactacgggaaggctcccggggcagaggagtacgctcaacaagatgtgttaaagaaatcttactccaaggccttcacgctgaccatctctgccctctttgtgacacccaagacgactggggcccgggtggagttaagcgagcagcaactgcagttgtggccgagtgatgtggacaagctgtcacccactgacaacctgccgcgggggagccgcgcccacatcaccctcggctgtgcagctgacgtagaggccgtgcagacgggccttgacctcttagagattctgcggcaggagaaggggggcagccgaggcgaggaggtgggcgagctaagccggggcaagctctattccttgggcaatgggcgctggatgctgaccctggccaagaacatggaggtcagggccatcttcacgggatactacgggaaaggcaaacctgtgcccacgcaaggtagccggaaggggggcgccttgcagtcctgcaccatcatatgagtgttctcaccaccacttatgcccctagaagggaaggggagagggaaacgtgccctctgtttgatccttgttttgtgacatttttttttttttttttttttactcaaagttaacctacctgtaactttttaaaaacttgtaaaataactgaccctcccttcctgtccgccctcttcccctctaatgctcacgctcccaacacaaggtgggcagggaggcaccattcaggaacctggaccaacctcagcaacctgtaagactgataatgaaataaatcatgttaatcct

SEQ ID NO: 430 - protein, 421 aa, Homo sapiens
MNRGFSRKSHTFLPKIFFRKMSSSGAKDKPELQFPFLQDEDTVATLLECKTLFILRGLPGSGKSTLARVIVDKYRDGTKMVSADAYKITPGARGAFSEEYKRLDEDLAAYCRRRDIRILVLDDTNHERERLEQLFEMADQYQYQVVLVEPKTAWRLDCAQLKEKNQWQLSADDLKKLKPGLEKDFLPLYFGWFLTKKSSETLRKAGQVFLEELGNHKAFKKELRQFVPGDEPREKMDLVTYFGKRPPGVLHCTTKFCDYGKAPGAEEYAQQDVLKKSYSKAFTLTISALFVTPKTTGARVELSEQQLQLWPSDVDKLSPTDNLPRGSRAHITLGCAADVEAVQTGLDLLEILRQEKGGSRGEEVGELSRGKLYSLGNGRWMLTLAKNMEVRAIFTGYYGKGKPVPTQGSRKGGALQSCTII

SEQ ID NO: 431 - DNA, 1833 bp, Homo sapiens
  CDS (160)..(1617)
attttggggtgttctgctctggcggcagcggcagcggcggcgggacgcggaggctcccccgggattcggcctcagcagcgaggcggcggcggcggctgcggaggcgcaggcagcaactgaggcagcggcaggctcaggtgcagccgctgctcaaagaaaatgaacggcaccctggaccacccagaccaaccagatcttgatgctatcaagatgtttgtgggccaggttccaaggacctggtctgaaaaggacttgcgggaactcttcgaacagtatggtgctgtgtatgaaatcaacgtcctaagggataggagccaaaacccgcctcagagcaaagggtgctgttttgttacattttacacccgtaaagctgcattagaagctcagaatgctcttcacaacatgaaagtcctcccagggatgcatcaccctatacagatgaaacctgctgacagtgagaagaacaatgcagtggaagacaggaagctgtttattggtatgatttccaagaagtgcactgaaaatgacatccgagtcatgttctcttcgtttggacagattgaagaatgccggatattgcggggacctgatggcctgagccgaggttgtgcatttgtgacttttacaacaagagccatggcacagacggctatcaaggcaatgcaccaagcacagaccatggagggttgctcatcacccatggtggtaaaatttgctgatacacagaaggacaaagaacagaagagaatggcccagcagctccagcagcagatgcagcaaatcagcgcagcatctgtgtggggaaaccttgctggtctaaatactcttggaccccagtatttagcactttatttgcagctccttcagcagactgcctcctctgggaacctcaacaccctgagcagcctccacccaatgggagggttgaatgcaatgcagttacagaatttggctgcactagctgctgcagctagtgcagctcagaacacaccaagtggtaccaatgctctcactacatccagcagtcccctcagcgtgctcactagttcagggtcctcacctagctctagcagcagtaattctgtcaaccccatagcctcacttggagccctgcagacattagctggagcaacggctggcctcaatgttggctctttggcaggaatggctgctttaaatggtggcctgggcagcagtggcctttccaatggcaccgggagcaccatggaggccctcactcaggcctactcgggtatccagcaatatgctgctgctgcgctccccactctgtacaaccagaatcttctgacacagcagagtattggtgctgctggaagccagaaggaaggtccagagggagccaacctgttcatctaccacctgccccaggagtttggtgatcaggacctgctacagatgtttatgccctttgggaatgtcgtgtctgccaaggttttcatagacaagcagacaaacctgagcaagtgttttggttttgtaagttacgacaatcctgtttcggcccaagctgccatccagtccatgaacggctttcagattggcatgaagcggcttaaagtgcagctcaaacgttcgaagaatgacagcaagccctactgagcgtgctcccctctgagactggagtgagagggtcttctggcacagcttgccctgaagactcggctactgccttctgtgggagtttcgcttcgtacagaggacaagtttgtgctttggtttccagtgttttactttggagtttaggtgccatatcctgaggttttttttgtttttgtttttgtttctcctttatttaaagtttgctgtgtttgt

SEQ ID NO: 432 - protein, 486 aa, Homo sapiens
MNGTLDHPDQPDLDAIKMFVGQVPRTWSEKDLRELFEQYGAVYEINVLRDRSQNPPQSKGCCFVTFYTRKAALEAQNALHNMKVLPGMHHPIQMKPADSEKNNAVEDRKLFIGMISKKCTENDIRVMFSSFGQIEECRILRGPDGLSRGCAFVTFTTRAMAQTAIKAMHQAQTMEGCSSPMVVKFADTQKDKEQKRMAQQLQQQMQQISAASVWGNLAGLNTLGPQYLALYLQLLQQTASSGNLNTLSSLHPMGGLNAMQLQNLAALAAAASAAQNTPSGTNALTTSSSPLSVLTSSGSSPSSSSSNSVNPIASLGALQTLAGATAGLNVGSLAGMAALNGGLGSSGLSNGTGSTMEALTQAYSGIQQYAAAALPTLYNQNLLTQQSIGAAGSQKEGPEGANLFIYHLPQEFGDQDLLQMFMPFGNVVSAKVFIDKQTNLSKCFGFVSYDNPVSAQAAIQSMNGFQIGMKRLKVQLKRSKNDSKPY

SEQ ID NO: 433 - DNA, 2178 bp, Homo sapiens
  CDS (127)..(1428)
ggttgcgctgcggagcgcagctgtgagggagtcgctgtgatccggggccccggaacccgagctggagctgaagcgcaggctgcggggcgcggagtcgggagtgcaggcctgagtgttccttccagcatgtcggagggggagtcccagacagtacttagcagtggctcagacccaaaggtagaatcctcatcttcagctcctggcctgacatcagtgtcacctcctgtgacctccacaacctcagctgcttccccagaagaagaagaagaaagtgaagatgagtctgagattttggaagagtcgccctgtgggcgctggcagaagaggcgagaagaggtgaatcaacggaatgtaccaggtattgacagtgcatacctggccatggatacagaggaaggtgtagaggttgtgtggaatgaggtacagttctctgaacgcaagaactacaagctgcaggaggaaaaggttcgtgctgtgtttgataatctgattcaattggagcatcttaacattgttaagtttcacaaatattgggctgacattaaagagaacaaggccagggtcatttttatcacagaatacatgtcatctgggagtctgaagcaatttctgaagaagaccaaaaagaaccacaagacgatgaatgaaaaggcatggaagcgttggtgcacacaaatcctctctgccctaagctacctgcactcctgtgacccccccatcatccatgggaacctgacctgtgacaccatcttcatccagcacaacggactcatcaagattggctctgtggctcctgacactatcaacaatcatgtgaagacttgtcgagaagagcagaagaatctacacttctttgcaccagagtatggagaagtcactaatgtgacaacagcagtggacatctactcctttggcatgtgtgcactggagatggcagtgctggagattcagggcaatggagagtcctcatatgtgccacaggaagccatcagcagtgccatccagcttctagaagacccattacagagggagttcattcaaaagtgcctgcagtctgagcctgctcgcagaccaacagccagagaacttctgttccacccagcattgtttgaagtgccctcgctcaaactccttgcggcccactgcattgtgggacaccaacacatgatcccagagaacgctctagaggagatcaccaaaaacatggatactagtgccgtactggctgaaatccctgcaggaccaggaagagaaccagttcagactttgtactctcagtcaccagctctggaattagataaattccttgaagatgtcaggaatgggatctatcctctgacagcctttgggctgcctcggccccagcagccacagcaggaggaggtgacatcacctgtcgtgccccccctctgtcaagactccgacacctgaaccagctgaggtggagactcgcaaggtggtgctgatgcagtgcaacattgagtcggtggaggagggagtcaaacaccacctgacacttctgctgaagttggaggacaaactgaaccggcacctgagctgtgacctgatgccaaatgagaatatccccgagttggcggctgagctggtgcagctgggcttcattagtgaggctgaccagagccggttgacttctctgctagaagagaccttgaacaagttcaattttgccaggaacagtaccctcaactcagccgctgtcaccgtctcctcttagagctcactcgggccaggccctgatctgcgctgtggctgtccctggacgtgctgcagccctcctgtcccttccccccagtcagtattaccctgtgaagccccttccctcctttattattcaggagggctgggggggctccctggttctgagcatcatcctttcccctcccctctcttcctcccctctgcactttgtttacttgttttgcacagacgtgggcctgggccttctcagcagccgccttctagttgggggctagtcgctgatctgccggctcccgcccagcctgtgtggaaaggaggcccacgggcactaggggagccgaattctacaatcccgctggggcggccggggcgggagagaaaggtggtgctgcagtggtggccctggggggccattcgattcgcctcagttgctgctgtaataaaagtctactttttgct

SEQ ID NO: 434 - protein, 434 aa, Homo sapiens
MSEGESQTVLSSGSDPKVESSSSAPGLTSVSPPVTSTTSAASPEEEEESEDESEILEESPCGRWQKRREEVNQRNVPGIDSAYLAMDTEEGVEVVWNEVQFSERKNYKLQEEKVRAVFDNLIQLEHLNIVKFHKYWADIKENKARVIFITEYMSSGSLKQFLKKTKKNHKTMNEKAWKRWCTQILSALSYLHSCDPPIIHGNLTCDTIFIQHNGLIKIGSVAPDTINNHVKTCREEQKNLHFFAPEYGEVTNVTTAVDIYSFGMCALEMAVLEIQGNGESSYVPQEAISSAIQLLEDPLQREFIQKCLQSEPARRPTARELLFHPALFEVPSLKLLAAHCIVGHQHMIPENALEEITKNMDTSAVLAEIPAGPGREPVQTLYSQSPALELDKFLEDVRNGIYPLTAFGLPRPQQPQQEEVTSPVVPPLCQDSDT

SEQ ID NO: 435 - DNA, 2440 bp, Homo sapiens
  CDS (63)..(2300)
gtgctgcggccgcggagcccccgagggcccagtgttcaccatcataccaggggccagaggcgatggcttgcctccatgagacccgaacaccctctccttcctttgggggctttgtgtctaccctaagtgaggcatccatgcgcaagctggacccagacacttctgactgcactcccgagaaggacctgacgcctacccagtgtgtacttcgagatgtggtaccccttggtgggcagggtgggggagggcccagcccctccccaggtggagagccgccccctgagccttttgccaacagtgtcctgcagctacatgagcaggatgcagggggcccagggggagcagctgggtcacctgagagtcgggcatccagagttcgagctgacgaggtgcgactgcagtgccagagtggcagtggcttccttgagggcctctttggctgcctgcgccctgtctggaccatgattggcaaagcctactccactgagcacaagcagcagcaggaagacctttgggaggtcccctttgaggaaatcctggacctgcagtgggtgggctcaggggcccagggtgctgtcttcctggggcgcttccacggggaggaggtggctgtgaagaaggtgcgagacctcaaagaaaccgacatcaagcacttgcgaaagctgaagcaccccaacatcatcactttcaagggtgtgtgcacccaggctccctgctactgcatcctcatggagttctgcgcccagggccagctgtatgaggtactgcgggctggccgccctgtcaccccctccttactggttgactggtccatgggcatcgctggtggcatgaactacctgcacctgcacaagattatccacagggatctcaagtcacccaacatgctaatcacctacgacgatgtggtgaagatctcagattttggcacttccaaggagctgagtgacaagagcaccaagatgtcctttgcagggacagtagcctggatggcccctgaggtgatccgcaatgaacctgtgtctgagaaggtcgacatctggtcctttggcgtggtgctatgggaactgctgactggtgagatcccctacaaagacgtagattcctcagccattatctggggtgtgggaagcaacagtctccatctgcccgtgccctccagttgcccagatggtttcaagatcctgcttcgccagtgctggaatagcaaaccacgaaatcgcccatcattccgacagatcctgctgcatctggacattgcctcagctgatgtactctccacaccccaggagacttactttaagtcccaggcagagtggcgggaagaagtaaaactgcactttgaaaagattaagtcagaagggacctgtctgcaccgcctagaagaggaactggtgatgaggaggagggaggagctcagacacgccctggacatcagggagcactatgaaaggaagctggagagagccaacaacctgtatatggaacttaatgccctcatgttgcagctggaactcaaggagagggagctgctcaggcgagagcaagctttagagcggaggtgcccaggcctgctgaagccacacccttcccggggcctcctgcatggaaacacaatggagaagcttatcaagaagaggaatgtgccacagaagctgtcaccccatagcaaaaggccagatatcctcaagacggagtctttgctccctaaactagatgcagccctgagtggggtggggcttcctgggtgtcctaagggccccccctcaccaggacggagtcgccgtggcaagacccgtcaccgcaaggccagcgccaaggggagctgtggggacctgcctgggcttcgtacagctgtgccaccccatgaacctggaggaccaggaagcccagggggcctaggagggggaccctcagcctgggaggcctgccctcccgccctccgtgggcttcatcatgacctcctgctccgcaaaatgtcttcatcgtccccagacctgctgtcagcagcactagggtcccggggccggggggccacaggcggagctggggatcctggctcaccacctccggcccggggtgacaccccaccaagtgagggctcagcccctggctccaccagcccagattcacctgggggagccaaaggggaaccacctcctccagtagggcctggtgaaggtgtggggcttctgggaactggaaggtttctcaggtggcaatgtaactcatttttttgtcccaccatttatcttctctgcccaagccctgtcttaaggcccagggggaggttaggagactgatagcatgtgatggctcaggctgaagaaccggggtgctgtttaagtccctgcttttatcctggtgcctgattggggtggggactgtcctactgtaacccctgtgaaaaaccttgaaatataacactccatgcaggccc

SEQ ID NO: 436 - protein, 746 aa, Homo sapiens
MACLHETRTPSPSFGGFVSTLSEASMRKLDPDTSDCTPEKDLTPTQCVLRDVVPLGGQGGGGPSPSPGGEPPPEPFANSVLQLHEQDAGGPGGAAGSPESRASRVRADEVRLQCQSGSGFLEGLFGCLRPVWTMIGKAYSTEHKQQQEDLWEVPFEEILDLQWVGSGAQGAVFLGRFHGEEVAVKKVRDLKETDIKHLRKLKHPNIITFKGVCTQAPCYCILMEFCAQGQLYEVLRAGRPVTPSLLVDWSMGIAGGMNYLHLHKIIHRDLKSPNMLITYDDVVKISDFGTSKELSDKSTKMSFAGTVAWMAPEVIRNEPVSEKVDIWSFGVVLWELLTGEIPYKDVDSSAIIWGVGSNSLHLPVPSSCPDGFKILLRQCWNSKPRNRPSFRQILLHLDIASADVLSTPQETYFKSQAEWREEVKLHFEKIKSEGTCLHRLEEELVMRRREELRHALDIREHYERKLERANNLYMELNALMLQLELKERELLRREQALERRCPGLLKPHPSRGLLHGNTMEKLIKKRNVPQKLSPHSKRPDILKTESLLPKLDAALSGVGLPGCPKGPPSPGRSRRGKTRHRKASAKGSCGDLPGLRTAVPPHEPGGPGSPGGLGGGPSAWEACPPALRGLHHDLLLRKMSSSSPDLLSAALGSRGRGATGGAGDPGSPPPARGDTPPSEGSAPGSTSPDSPGGAKGEPPPPVGPGEGVGLLGTGRFLRWQCNSFFCPTIYLLCPSPVLRPRGRLGD

SEQ ID NO: 437 - DNA, 3428 bp, Homo sapiens
  CDS (63)..(2738)
gtgctgcggccgcggagcccccgagggcccagtgttcaccatcataccaggggccagaggcgatggcttgcctccatgagacccgaacaccctctccttcctttgggggctttgtgtctaccctaagtgaggcatccatgcgcaagctggacccagacacttctgactgcactcccgagaaggacctgacgcctacccagtgtgtacttcgagatgtggtaccccttggtgggcagggtgggggagggcccagcccctccccaggtggagagccgccccctgagccttttgccaacagtgtcctgcagctacatgagcaggatgcagggggcccagggggagcagctgggtcacctgagagtcgggcatccagagttcgagctgacgaggtgcgactgcagtgccagagtggcagtggcttccttgagggcctctttggctgcctgcgccctgtctggaccatgattggcaaagcctactccactgagcacaagcagcagcaggaagacctttgggaggtcccctttgaggaaatcctggacctgcagtgggtgggctcaggggcccagggtgctgtcttcctggggcgcttccacggggaggaggtggctgtgaagaaggtgcgagacctcaaagaaaccgacatcaagcacttgcgaaagctgaagcaccccaacatcatcactttcaagggtgtgtgcacccaggctccctgctactgcatcctcatggagttctgcgcccagggccagctgtatgaggtactgcgggctggccgccctgtcaccccctccttactggttgactggtccatgggcatcgctggtggcatgaactacctgcacctgcacaagattatccacagggatctcaagtcacccaacatgctaatcacctacgacgatgtggtgaagatctcagattttggcacttccaaggagctgagtgacaagagcaccaagatgtcctttgcagggacagtagcctggatggcccctgaggtgatccgcaatgaacctgtgtctgagaaggtcgacatctggtcctttggcgtggtgctatgggaactgctgactggtgagatcccctacaaagacgtagattcctcagccattatctggggtgtgggaagcaacagtctccatctgcccgtgccctccagttgcccagatggtttcaagatcctgcttcgccagtgctggaatagcaaaccacgaaatcgcccatcattccgacagatcctgctgcatctggacattgcctcagctgatgtactctccacaccccaggagacttactttaagtcccaggcagagtggcgggaagaagtaaaactgcactttgaaaagattaagtcagaagggacctgtctgcaccgcctagaagaggaactggtgatgaggaggagggaggagctcagacacgccctggacatcagggagcactatgaaaggaagctggagagagccaacaacctgtatatggaacttaatgccctcatgttgcagctggaactcaaggagagggagctgctcaggcgagagcaagctttagagcggaggtgcccaggcctgctgaagccacacccttcccggggcctcctgcatggaaacacaatggagaagcttatcaagaagaggaatgtgccacagaagctgtcaccccatagcaaaaggccagatatcctcaaggcggagtctttgctccctaaactagatgcagccctgagtggggtggggcttcctgggtgtcctaaggcccccccctcaccaggacggagtcgccgtggcaagacccgtcaccgcaaggccagcgccaaggggagctgtggggacctgcctgggcttcgtacagctgtgccaccccatgaacctggaggaccaggaagcccagggggcctaggagggggaccctcagcctgggaggcctgccctcccgccctccgtgggcttcatcatgacctcctgctccgcaaaatgtcttcatcgtccccagacctgctgtcagcagcactagggtcccggggccggggggccacaggcggagctggggatcctggctcaccacctccggcccggggtgacaccccaccaagtgagggctcagcccctggctccaccagcccagattcacctgggggagccaaaggggaaccacctcctccagtagggcctggtgaaggtgtggggcttctgggaactggaagggaagggacctcaggccggggaggaagccgggctgggtcccagcacttgaccccagctgcactgctgtacagggctgccgtcacccgaagtcagaaacgtggcatctcatcggaagaggaggaaggagaggtagacagtgaagtagagctgacatcaagccagaggtggcctcagagcctgaacatgcgccagtcactatctaccttcagctcagagaatccatcagatggggaggaaggcacagctagtgaaccttcccccagtggcacacctgaagttggcagcaccaacactgatgagcggccagatgagcggtctgatgacatgtgctcccagggctcagaaatcccactggacccacctccttcagaggtcatccctggccctgaacccagctccctgcccattccacaccaggaacttctcagagagcggggccctcccaattctgaggactcagactgtgacagcactgaattggacaactccaacagcgttgatgccttgcgccccccagcttccctccctccatgaaagccactcgtattccttgtacatagagaaatatttatatggattatatatatatacatatatatatatatatgcgccacataatcaacagaaagatggggctgtcccagccgtaagtcaggctcgagggagactgatcccctgaccaattcacctgataaactctagggacactggcagctgtggaaatgaatgaggcacagccgtagagctgtggctaagggcaagccccttcctgccccaccccattccttatattcagcaagcaacaaggcaatagaaaagccagggttgtctttatattctttatccccaaataatagggggtggggggaggggcggtgggaggggcaggagagaaaaccacttagactgcacttttctgttccgtttactctgtttacacattttgcacttgggaggagggaggctaaggctgggtcctcccctctgaggtttctcaggtggcaatgtaactcatttttttgtcccaccatttatcttctctgcccaagccctgtcttaaggcccagggggaggttaggagactgatagcatgtgatggctcaggctgaagaaccggggttctgtttaagtccctgcttttatcctggtgcctgattggggtggggactgtcctactgtaacccctgtgaaaaaccttgaaaaataacactccatgcagga

SEQ ID NO: 438 - protein, 892 aa, Homo sapiens
MACLHETRTPSPSFGGFVSTLSEASMRKLDPDTSDCTPEKDLTPTQCVLRDVVPLGGQGGGGPSPSPGGEPPPEPFANSVLQLHEQDAGGPGGAAGSPESRASRVRADEVRLQCQSGSGFLEGLFGCLRPVWTMIGKAYSTEHKQQQEDLWEVPFEEILDLQWVGSGAQGAVFLGRFHGEEVAVKKVRDLKETDIKHLRKLKHPNIITFKGVCTQAPCYCILMEFCAQGQLYEVLRAGRPVTPSLLVDWSMGIAGGMNYLHLHKIIHRDLKSPNMLITYDDVVKISDFGTSKELSDKSTKMSFAGTVAWMAPEVIRNEPVSEKVDIWSFGVVLWELLTGEIPYKDVDSSAIIWGVGSNSLHLPVPSSCPDGFKILLRQCWNSKPRNRPSFRQILLHLDIASADVLSTPQETYFKSQAEWREEVKLHFEKIKSEGTCLHRLEEELVMRRREELRHALDIREHYERKLERANNLYMELNALMLQLELKERELLRREQALERRCPGLLKPHPSRGLLHGNTMEKLIKKRNVPQKLSPHSKRPDILKAESLLPKLDAALSGVGLPGCPKAPPSPGRSRRGKTRHRKASAKGSCGDLPGLRTAVPPHEPGGPGSPGGLGGGPSAWEACPPALRGLHHDLLLRKMSSSSPDLLSAALGSRGRGATGGAGDPGSPPPARGDTPPSEGSAPGSTSPDSPGGAKGEPPPPVGPGEGVGLLGTGREGTSGRGGSRAGSQHLTPAALLYRAAVTRSQKRGISSEEEEGEVDSEVELTSSQRWPQSLNMRQSLSTFSSENPSDGEEGTASEPSPSGTPEVGSTNTDERPDERSDDMCSQGSEIPLDPPPSEVIPGPEPSSLPIPHQELLRERGPPNSEDSDCDSTELDNSNSVDALRPPASLPP

SEQ ID NO: 439 - DNA, 1599 bp, Homo sapiens
  CDS (27)..(653)
gcatcaccgcgggcctcgaccccgaaatggcgctgctggccgaacacttgctgaagccgctgcccgcggacaagcagatcgagaccgggcccttcctcgaggcggtgtcccacctgccgcccttcttcgattgccttgggtccccagtgtttactcccatcaaggcagacataagcggcaacatcacgaaaatcaaagctgtgtacgacaccaacccagccaagttccggaccctgcagaacatcctggaggtggagaaagaaatgtatggagcagagtggcccaaagtaggggccacactggcgctgatgtggctgaaaagaggcctccgcttcatccaggtcttcctccagagcatctgcgacggggagcgggacgagaaccaccccaacctcatccgtgtcaacgccaccaaggcctacgagatggccctcaagaagtaccatggctggatcgtgcagaagatcttccaggcagcactgtacgcagcaccctataagtctgacttcctgaaagcgctctccaaggggcagaatgttacggaggaggagtgcctggagaagatccgcctcttcctagtcaactacacggcgaccatcgatgtcatctacgagatgtacacccagatgaacgctgagcttaactacaaggtgtaggcatgcccactgctggacacgtccccgactcgtggccacatggagaaacaggcaaaccagaatcactgtgaatcaagtcggtgaactgcccctggcctgtgtcccccagagcagcccagggtcctgccagagtctgcaggggacagccctcgttttttaagtcttttttttttttttttttggtctattctaaaggaccagtaaataatgatcttacttccaaatctccttggaatttcacgacagcacagactgactttataccttcatttcagcgtggtaaaaaccgattaacacttctaatgagtcaagtcctagggttttttggttttgttttgttgccaacgaggaacacagctctgggggaatggtgtcatccacctcgctttaaaaataagcacatgatggctgggcaccgtggctcacgcctgtaatcccagcactttgggaggctgaggcgggtggatcacctgaggtcgggagtttgagaccagcctggccaacatggtgaaaccccatcgctactaaaaatataaaaaattagctgggcatggtggcgcacgcctgtagttccagctactcaggaggctgaggcaggagaatcgcttgaacccgggaggtggaggttgcagtgagctgagatcgcaccattgcactccagcctgggcaacaagagcgaaactctgtctcaaaaaaaaaaaaaagaggtgggtggattacttgaggtcagggtttgagatcagcctgaccaacatggtgaaaccctatctctactaaaaatatagaattagccaggcatggtagcgcacgcctgtaatcccatcttcttgggaggctgaggcaggagaatcgctagaaactgggaggtggaggttacagtagccgagatcgcgccactgcattccagcctgggcaacaaaagcgaaactctgtctcaaaaaag

SEQ ID NO: 440 - protein, 209 aa, Homo sapiens; identical to SEQ ID NO: 326

SEQ ID NO: 441 - DNA, 2455 bp, Homo sapiens
  CDS (1277)..(2092)
agaataagtgctttttagctttctttgtatattgagttgcttttgaattgcttcccatatttttatttcatacaaactgaacaattgtggcccctctattttatttataaaggttcagtgtatctttgcctgcctacatcgatctgcaagggagttgcagaaagcctcatgttcatcgagccgtgagtcacaaccaatttctaagctgttataacaaaaaagtgtttgctttttttcacaagtaactttaaaagtgtagtttagaaagaaaacattttcaataaaaagacactacattaatcctggatgcttgcaaatcctaaaatatattcctcctctagcgttgcacagctctgtgttgtatacacagactagctttaaaatttgtcacataccactttacctttacttttatgtatcattcccccgacttccttactgcaggtgtgggcaagaaaacttttcctttaacacttttcaacagcgggcataaaattctgcagctgaggtcttgaagaatgcagatgggtacagtatgtgttggagctcacagtgtgtattgactaacctagttccttttttgctttttttggtattgtcttgttaaaagtgactcccaggtagcaactctcttttttaagggtgggaacgaaagggacgtaggaagaatagatctagattatttaacagtcttcgatagagtttgaaagctttcttcttcattcaattttgggcaaaatactgcctctgcatttgttcataacaaaaagattagattaataagtagcttttgttggtggaaattaccagctctataagtcacccttggtggttcatggacctctgattagcttgggttttgcagtctcattgccacatgtatatgtggagccaatggccttttggtgctcagctgtttacgtctgactccttgacttctttggtacagtgatggagtcagatctcattaagtgtgattctccatgatataactagcctcaaaaaaatgtgtattccactccagttgtaaatatctttagatcagcttttcattgcatttgatggggagaacacagaaatgatagtctgcaaatcatccaggtgaattgttatactagttattttttggtggttaatgtgataatattgtcttatttaaaaccacaaatgaatttcaggagacgaaaccagacagagggtcaagtttacagatgaccgtgtctgcaagagtcaccttctggactgctgcccccatgacatcctggctgggacgcgcatggatttaggagaatgtaccaaaatccacgacttggccctccgagcagattatgagattgcaagtaaagaaagagacctgttttttgaattagatgcaatggatcacttggagtcctttattgctgaatgtgatcggagaactgagctcgccaagaagcggctggcagaaacacaggaggaaatcagtgcggaagtttctgcaaaggcagaaaaagtacatgagttaaatgaagaaataggaaaactcctcgctaaagccgaacagctaggggctgaaggtaatgtggatgaatcccagaagattcttatggaagtggaaaaagttcgtgcgaagaaaaaagaagctgaggaagaatacagaaattccatgcctgcatccagttttcagcagcaaaagctgcgtgtctgcgaggtctgttcagcctaccttggtctccatgacaatgaccgtcgcctggcagaccacttcggtggcaagttacacttggggttcattcagatccgagagaagcttgatcagttgaggaaaactgtcgctgaaaagcaggagaagagaaatcaggatcgcttgaggaggagagaggagagggaacgggaggagcgtctgagcaggaggtcgggatcaagaaccagagatcgcaggaggtcacgctcccgggatcggcgtcggaggcggtcaagatctacctcccgagagcgacggaaattgtcccggtcccggtcccgagatagacatcggcgccaccgcagccgttcccggagccacagccggggacatcgtcgggcttcccgggaccgaagtgcgaaatacaagtaactactctgactccttcggttctccagagagcgggcatccagagaggagtcctgggagagcgggcggagcgagcgagggcccccggactggaggcttgagagctccaacgggaagatggcttcacggaggtcagaagagaaggaggccggcgagatctgaacccgtctcccgggtgctgtaaatagtctgataaacgttcacacagtctaaaattaccctttatatttgctgaatacaactcatcttttgtagtttaaaatttctattgttttggagctagctgtgagtttctagaagtgtacagagttgctcctgtgttcccgggtcatgttgagtaggaataaataaatctgatgctgc

SEQ ID NO: 442 - protein, 272 aa, Homo sapiens
MDLGECTKIHDLALRADYEIASKERDLFFELDAMDHLESFIAECDRRTELAKKRLAETQEEISAEVSAKAEKVHELNEEIGKLLAKAEQLGAEGNVDESQKILMEVEKVRAKKKEAEEEYRNSMPASSFQQQKLRVCEVCSAYLGLHDNDRRLADHFGGKLHLGFIQIREKLDQLRKTVAEKQEKRNQDRLRRREEREREERLSRRSGSRTRDRRRSRSRDRRRRRSRSTSRERRKLSRSRSRDRHRRHRSRSRSHSRGHRRASRDRSAKYK

SEQ ID NO: 443 - DNA, 1451 bp, Homo sapiens; identical to SEQ ID NO: 327
  CDS (72)..(1046)

SEQ ID NO: 444 - protein, 325 aa, Homo sapiens; identical to SEQ ID NO: 328

SEQ ID NO: 445 - DNA, 1324 bp, Homo sapiens
  CDS (58)..(1245)
ctttttcctgtggcagcagccgggctgagaggagcgtggctgtctcctctctccgccatggcgtgtgctcgcccactgatatcggtgtactccgaaaagggggagtcatctggcaaaaatgtcactttgcctgctgtattcaaggctcctattcgaccagatattgtgaactttgttcacaccaacttgcgcaaaaacaacagacagccctatgctgtcagtgaattagcaggtcatcagactagtgctgagtcttggggtactggcagagctgtggctcgaattcccagagttcgaggtggtgggactcaccgctctggccagggtgcttttggaaacatgtgtcgtggaggccgaatgtttgcaccaaccaaaacctggcgccgttggcatcgtagagtgaacacaacccaaaaacgatacgccatctgttctgccctggctgcctcagccctaccagcactggtcatgtctaaaggtcatcgtattgaggaagttcctgaacttcctttggtagttgaagataaagttgaaggctacaagaagaccaaggaagctgttttgctccttaagaaacttaaagcctggaatgatatcaaaaaggtctatgcctctcagcgaatgagagctggcaaaggcaaaatgagaaaccgtcgccgtatccagcgcaggggcccgtgcatcatctataatgaggataatggtatcatcaaggccttcagaaacatccctggaattactctgcttaatgtaagcaagctgaacattttgaagcttgctcctggtgggcatgtgggacgtttctgcatttggactgaaagtgctttccggaagttagatgaattgtacggcacttggcgtaaagccgcttccctcaagagtaactacaatcttcccatgcacaagatgattaatacagatcttagcagaatcttgaaaagcccagagatccaaagagcccttcgagcaccacgcaagaagatccatcgcagagtcctaaagaagaacccactgaaaaacttgagaatcatgttgaagctaaacccatatgcaaagaccatgcgccggaacaccattcttcgccaggccaggaatcacaagctccgggtggataaggcagctgctgcagcagcggcactacaagccaaatcagatgagaaggcggcggttgcaggcaagaaaccagcccctgaaaagaagcctgcagagaagaaacctactacagaggagaagaagcctgctgcataaactcttaaatttgattattccataaaggtcaaatcattttggacagcttcttttgaataaagacctgattatacag

SEQ ID NO: 446 - protein, 396 aa, Homo sapiens
MACARPLISVYSEKGESSGKNVTLPAVFKAPIRPDIVNFVHTNLRKNNRQPYAVSELAGHQTSAESWGTGRAVARIPRVRGGGTHRSGQGAFGNMCRGGRMFAPTKTWRRWHRRVNTTQKRYAICSALAASALPALVMSKGHRIEEVPELPLVVEDKVEGYKKTKEAVLLLKKLKAWNDIKKVYASQRMRAGKGKMRNRRRIQRRGPCIIYNEDNGIIKAFRNIPGITLLNVSKLNILKLAPGGHVGRFCIWTESAFRKLDELYGTWRKAASLKSNYNLPMHKMINTDLSRILKSPEIQRALRAPRKKIHRRVLKKNPLKNLRIMLKLNPYAKTMRRNTILRQARNHKLRVDKAAAAAAALQAKSDEKAAVAGKKPAPEKKPAEKKPTTEEKKPAA

SEQ ID NO: 447 - DNA, 1418 bp, Homo sapiens
  CDS (57)..(1337)
cttttcctgtggcagcagccgggctgagaggagcgtggctgtctcctctctccgccatggcgtgtgctcgcccactgatatcggtgtactccgaaaagggggagtcatctggcaaaaatgtcactttgcctgctgtattcaaggctcctattcgaccagatattgtgaactttgttcacaccaacttgcgcaaaaacaacagacagccctatgctgtcagtgaattagcaggtcatcagactagtgctgagtcttggggtactggcagagctgtggctcgaattcccagagttcgaggtggtgggactcaccgctctggccagggtgcttttggaaacatgtgtcgtggaggccgaatgtttgcaccaaccaaaacctggcgccgttggcatcgtagagtgaacacaacccaaaaacgatacgccatctgttctgccctggctgcctcagccctaccagcactggtcatgtctaaaggtcatcgtattgaggaagttcctgaacttcctttggtagttgaagataaagttgaaggctacaagaagaccaaggaagctgttttgctccttaagaaacttaaagcctggaatgatatcaaaaaggtctatgcctctcagcgaatgagagctggcaaaggcaaaatgagaaaccgtcgccgtatccagcgcaggggcccgtgcatcatctataatgaggataatggtatcatcaaggccttcagaaacatccctggaattactctgcttaatgtaagcaagctgaacattttgaagcttgctcctggtgggcatgtgggacgtttctgcatttggactgaaagtgctttccggaagttagatgaattgtacggcacttggcgtaaagccgcttccctcaagagtaactacaatcttcccatgcacaagatgattaatacagatcttagcagaatcttgaaaagcccagagatccaaagagcccttcgagcaccacgcaagaagatccatcgcagagtcctaaagaagaacccactgaaaaacttgagaatcatgttgaagctaaacccatatgcaaagaccatgcgccggaacaccattcttcgccaggccaggaatcacaagctccgggtggataaggcagctgctgcagcagcggcactacaagccaaatcagatgagaaggcggcggttgcaggcaagaagcctgtggtaggtaagaaaggaaagaaggctgctgttggtgttaagaagcagaagaagcctctggtgggaaaaaaggcagcagctaccaagaaaccagcccctgaaaagaagcctgcagagaagaaacctactacagaggagaagaagcctgctgcataaactcttaaatttgattattccataaaggtcaaatcattttggacagcttcttttgaataaagacctgattatacaggc

SEQ ID NO: 448 - protein, 427 aa, Homo sapiens [sequence omitted]

SEQ ID NO: 449 - DNA, 3803 bp, Homo sapiens
  CDS (211)..(2751)
ggcggcgcaaccagccttctagggcggcggagagttgtctgctggttctcagcttgaagaagattctgcagtccttattgatcctttttcttggcgttaccattttttgaagcaaagttaacctagctttctagtttgagctttctttttggccgtctttaaaaaaaattttttttttaatctataaaatagacaagagctagttctacaatgtccaagtcattccagcagtcatctctcagtagggactcacagggtcatgggcgtgacctgtctgcggcaggaataggccttcttgctgctgctacccagtctttaagtatgccagcatctcttggaaggatgaaccagggtactgcacgccttgctagtttaatgaatcttggaatgagttcttcattgaatcaacaaggagctcatagtgcactgtcttctgctagtacttcttcccataatttgcagtctatatttaacattggaagtagaggtccactccctttatcttctcaacaccgtggagatgcagaccaggccagtaacattttggccagctttggtctgtctgctagagacttagatgaactgagtcgttatccagaggacaagattactcctgagaatttgccccaaatccttctacagcttaaaaggaggagaactgaagaaggccctaccttgagttatggtagagatggcagatctgctacacgggagccaccatacagagtacctagggatgattgggaagaaaaaaggcactttagaagagatagttttgatgatcgtggtcctagtctcaacccagtgcttgattatgaccatggaagtcgttctcaagaatctggttattatgacagaatggattatgaagatgacagattaagagatggagaaaggtgtagggatgattctttttttggtgagacctcgcataactatcataaatttgacagtgagtatgagagaatgggacgtggtcctggccccttacaagagagatctctctttgagaaaaagagaggcgctcctccaagtagcaatattgaagacttccatggactcttaccgaagggttatccccatctgtgctctatatgtgatttgccagttcattctaataaggagtggagtcaacatatcaatggagcaagtcacagtcgtcgatgccagcttcttcttgaaatctacccagaatggaatcctgacaatgatacaggacacacaatgggtgatccattcatgttgcagcagtctacaaatccagcaccaggaattctgggacctccacctccctcatttcatcttgggggaccagcagttggaccaagaggaaatctgggtgctggaaatggaaacctgcaaggacctagacacatgcagaaaggcagagtggaaactagcagagttgttcacatcatggattttcaacgagggaaaaacttgagataccagctattacagctggtagaaccatttggagtcatttcaaatcatctgattctaaataaaattaatgaggcatttattgaaatggcaaccacagaggatgctcaggccgcagtggattattacacaaccacaccagcgttagtatttggcaagccagtgagagttcatttatcccagaagtataaaagaataaagaaacctgaaggaaagccagatcagaagtttgatcaaaagcaagagcttggacgtgtgatacatctcagcaatttgccgcattctggctattctgatagtgctgttctcaagcttgctgagccttatgggaaaataaagaattacatattgatgaggatgaaaagtcaggcttttattgagatggagacaagagaagatgcaatggcaatggttgaccattgtttgaaaaaagccctttggtttcaggggagatgtgtgaaggttgacctgtctgagaaatataaaaaactggttctgaggattccaaacagaggcattgatttactgaaaaaagataaatcccgaaaaagatcttactctccagatggcaaagaatctccaagtgataagaaatccaaaactgatggttcccagaagactgagagttcaaccgaaggtaaagaacaagaagagaagtccggtgaagatggtgagaaagacacaaaggatgaccagacagagcaggaacctaatatgcttcttgaatctgaagatgagctacttgtagatgaagaagaagcagcagcactgctagaaagtggcagttcagtgggagacgagaccgatcttgctaatttaggtgatgtggcttctgatgggaaaaaggaaccatcagataaagctgtgaaaaaagatggaagtgcttcagcagcagcaaagaaaaagcttaaaaaggtggacaagatcgaggaacttgatcaagaaaacgaagcagcgttggaaaatggaattaaaaatgaggaaaacacagaaccaggtgctgaatcttctgagaacgctgatgatcccaacaaagatacaagtgaaaacgcagatggtcaaagtgatgagaacaaggacgactatacaatcccagatgagtatagaattggaccatatcagcccaatgttcctgttggtatagactatgtgatacctaaaacagggttttactgtaagctgtgttcactcttttatacaaatgaagaagttgcaaagaatactcattgcagcagccttcctcattatcagaaattaaagaaatttctgaataaattggcagaagaacgcagacagaagaaggaaacttaagatgtgcaaggagatttaatgatttcaaagaaaataatggttctttgtttttaatgttaaccttttttaaatacaatactgatagttagaagaaaactattgtactcttttgttttagtggagaaataatagatgtctgttcatgtgttaagtgttatagcaaaaaaaatacacatgtggttaagttaatgaatagtttttgttttatcagaatggcaacagacagaagtactttgtagagattgacttcctaagctacttaagacaacttgcaccactaagaaaaaaatgtagaaccatttggaaaaatgaaatttagtagttccaagtttcaaagaaatgtcaacattttattccattcaataaagaacaaaaccaatagtgtttttattactttcatctgaaacattccatgttttaatctgagccttgcagactttcatttggagtttgaacccgttttggttgcatttcatttttggagaacttaattaacgtgagattggcaattgaaatgcaggtgcagttttctgttaatgtcatgctgttgtttaggtaataagaaatattaagtaattggctttagattttgtaatttttttccctgagttcctgctagatttcgtattctagtagtcaatgtattttcagtgaaatgcaaaaatattcccattatctttgaccagtattaatttttgagatcttactgcttgtcacttgaatcccgtgattgtcatacatctctggtataagcaacatttgatttttgaagtgtgtagaccatctcttcatattttcaagatgtaattttacatttctgcatttttaaaacagtttggccataatcctagatgcacgcttctaattcatgtacctgcacatgtgacctttgtgaacagaaatttgcatgtataatttgtgtttacttgtaactttctggttatatactgcttatatctgtggattcaagttactgaagtgaataccaataaaaagaaaaccctaggccatgttaattggttatacatgtttggaatgttaaccaacgt

SEQ ID NO: 450 - protein, 847 aa, Homo sapiens
MSKSFQQSSLSRDSQGHGRDLSAAGIGLLAAATQSLSMPASLGRMNQGTARLASLMNLGMSSSLNQQGAHSALSSASTSSHNLQSIFNIGSRGPLPLSSQHRGDADQASNILASFGLSARDLDELSRYPEDKITPENLPQILLQLKRRRTEEGPTLSYGRDGRSATREPPYRVPRDDWEEKRHFRRDSFDDRGPSLNPVLDYDHGSRSQESGYYDRMDYEDDRLRDGERCRDDSFFGETSHNYHKFDSEYERMGRGPGPLQERSLFEKKRGAPPSSNIEDFHGLLPKGYPHLCSICDLPVHSNKEWSQHINGASHSRRCQLLLEIYPEWNPDNDTGHTMGDPFMLQQSTNPAPGILGPPPPSFHLGGPAVGPRGNLGAGNGNLQGPRHMQKGRVETSRVVHIMDFQRGKNLRYQLLQLVEPFGVISNHLILNKINEAFIEMATTEDAQAAVDYYTTTPALVFGKPVRVHLSQKYKRIKKPEGKPDQKFDQKQELGRVIHLSNLPHSGYSDSAVLKLAEPYGKIKNYILMRMKSQAFIEMETREDAMAMVDHCLKKALWFQGRCVKVDLSEKYKKLVLRIPNRGIDLLKKDKSRKRSYSPDGKESPSDKKSKTDGSQKTESSTEGKEQEEKSGEDGEKDTKDDQTEQEPNMLLESEDELLVDEEEAAALLESGSSVGDETDLANLGDVASDGKKEPSDKAVKKDGSASAAAKKKLKKVDKIEELDQENEAALENGIKNEENTEPGAESSENADDPNKDTSENADGQSDENKDDYTIPDEYRIGPYQPNVPVGIDYVIPKTGFYCKLCSLFYTNEEVAKNTHCSSLPHYQKLKKFLNKLAEERRQKKET

SEQ ID NO: 451 - DNA, 2349 bp, Homo sapiens
  CDS (1)..(2310)
atggaccgggaccttttgcggcagtcgctaaattgccacgggtcgtctttgctctctctacttcggagcgaacagcaggacaatccacacttccgtagcctcctggggtcggccgccgagccagcccggggcccgccgccccagcacccgttgcagggcagaaaagagaagagagttgacaacatcgagatacagaaattcatctccaaaaaagcggatctgctttttgcactttcctggaaatcagatgcacctgcaacttctgaaattaatgaagacagtgaagatcattatgcaatcatgccacctttagagcaattcatggagatacctagtatggatcggagagagctgtttttccgagatattgagcgtggtgatatagtgattggaagaattagttctattcgggaattcggttttttcatggtgttgatctgtttaggaagtggtatcatgagagatatagcccacttagaaatcacagctctttgtcccttaagagatgtgccttctcacagtaaccatggggatcctttatcatattaccaaactggtgacatcattcgagctggaatcaaggatattgacagataccatgaaaagctagcagtatctctgtatagctcttctcttccaccacacctatctggtattaaattaggtgtaattagctctgaagagcttcctttatactacaggagaagtgttgagctaaatagcaattctttggagtcctatgaaaatgtcatgcagagttccttgggatttgttaatccaggagtagttgaattccttctagaaaaactaggaatagatgaatctaatccaccatctttaatgagaggcctacaaagcaaaaatttctctgaagatgattttgcttctgcattgagaaaaaaacaatccgcatcttgggctttaaaatgtgtgaagatcggagttgactattttaaagttggacgccatgtggatgctatgaatgaatacaataaagctttggaaatagacaaacaaaacgtggaagctttggtagctcgtggagcattatatgcgacaaaaggaagtttgaacaaagcaatagaagattttgagcttgcattagaaaactgtccaactcacagaaatgcaagaaaatacctctgccagacacttgtagagagaggaggacagttagaagaagaagaaaagtttttaaatgctgaaagttactataagaaagctttggctttggatgagacttttaaagatgcagaggatgctttgcagaaacttcataaatatatgcagaaatctttggaattaagagaaaaacaagctgaaaaggaagaaaagcagaaaacaaagaaaatagaaacaagtgcagaaaagttgcgtaagctcttaaaagaagagaagaggctaaagaagaaaagaagaaaatcaacttcttcttcaagtgtttcttctgctgatgaatcagtgtcttcatcatcatcctcttcctcttctggtcacaaaaggcataagaaacataagaggaaccgttcagagtcttctcgcagttccagaaggcattcatctagggcatcctcaaatcagatagatcagaataggaaagatgagtgctacccagttccagctaatacttcagcatcttttcttaaccataaacaagaagtggagaaactactggggaagcaggataggttacagtatgaaaagacacagataaaagagaaagatagatgccctctctcttcatcttcacttgaaataccggatgattttggaggtaggtctgaagatccaagagatttttataacagctataaaacccaagcaggtagtagcaaaacagaaaagccatataaatcagaaagacatttttccagtagaagaaattcctcagattccttctgtaggaattcagaggacaagatttatggttataggagatttgaaaaggatatagagggaagaaaagagcactatagaaggtgggaaccaggttctgtgaggcattctacctcaccagcaagctcagaatactcttggaagtcagttgagaaatacaaaaaatacgctcactctggatcacgtgatttcagtagacatgagcaaagataccgtttaaatacaaatcaaggagaatatgaaagagaggacaattatggggaggatatcaaaacagaggttccagaagaagatgcactaagtagcaaagaacactcagaaagcagtgttaagaaaaatttacctcagaatttactgaatatatttaatcagatagctgaatttgaaaaagaaaaaggaaataagtcaaaaaattaatacaccaaggatatcggcaccattacacaaaatgcc

SEQ ID NO: 452 - protein, 770 aa, Homo sapiens
MDRDLLRQSLNCHGSSLLSLLRSEQQDNPHFRSLLGSAAEPARGPPPQHPLQGRKEKRVDNIEIQKFISKKADLLFALSWKSDAPATSEINEDSEDHYAIMPPLEQFMEIPSMDRRELFFRDIERGDIVIGRISSIREFGFFMVLICLGSGIMRDIAHLEITALCPLRDVPSHSNHGDPLSYYQTGDIIRAGIKDIDRYHEKLAVSLYSSSLPPHLSGIKLGVISSEELPLYYRRSVELNSNSLESYENVMQSSLGFVNPGVVEFLLEKLGIDESNPPSLMRGLQSKNFSEDDFASALRKKQSASWALKCVKIGVDYFKVGRHVDAMNEYNKALEIDKQNVEALVARGALYATKGSLNKAIEDFELALENCPTHRNARKYLCQTLVERGGQLEEEEKFLNAESYYKKALALDETFKDAEDALQKLHKYMQKSLELREKQAEKEEKQKTKKIETSAEKLRKLLKEEKRLKKKRRKSTSSSSVSSADESVSSSSSSSSSGHKRHKKHKRNRSESSRSSRRHSSRASSNQIDQNRKDECYPVPANTSASFLNHKQEVEKLLGKQDRLQYEKTQIKEKDRCPLSSSSLEIPDDFGGRSEDPRDFYNSYKTQAGSSKTEKPYKSERHFSSRRNSSDSFCRNSEDKIYGYRRFEKDIEGRKEHYRRWEPGSVRHSTSPASSEYSWKSVEKYKKYAHSGSRDFSRHEQRYRLNTNQGEYEREDNYGEDIKTEVPEEDALSSKEHSESSVKKNLPQNLLNIFNQIAEFEKEKGNKSKN

SEQ ID NO: 453 - DNA, 2332 bp, Homo sapiens
  CDS (1)..(1302)
atggaccgggaccttttgcggcagtcgctaaattgccacgggtcgtctttgctctctctacttcggagcgaacagcaggacaatccacacttccgtagcctcctggggtcggccgccgagccagcccggggcccgccgccccagcacccgttgcagggcagaaaagagaagagagttgacaacatcgagatacagaaattcatctccaaaaaagcggatctgctttttgcactttcctggaaatcagatgcacctgcaacttctgaaattaatgaagacagtgaagatcattatgcaatcatgccacctttagagcaattcatggagatacctagtatggatcggagagagctgtttttccgagatattgagcgtggtgatatagtgattggaagaattagttctattcgggaattcggttttttcatggtgttgatctgtttaggaagtggtatcatgagagatatagcccacttagaaatcacagctctttgtcccttaagagatgtgccttctcacagtaaccatggggatcctttatcatattaccaaactggtgacatcattcgagctggaatcaaggatattgacagataccatgaaaagctagcagtatctctgtatagctcttctcttccaccacacctatctggtattaaattaggtgtaattagctctgaagagcttcctttatactacaggagaagtgttgagctaaatagcaattctttggagtcctatgaaaatgtcatgcagagttccttgggatttgttaatccaggagtagttgaattccttctagaaaaactaggaatagatgaatctaatccaccatctttaatgagaggcctacaaagcaaaaatttctctgaagatgattttgcttctgcattgagaaaaaaacaatccgcatcttgggctttaaaatgtgtgaagatcggagttgactattttaaagttggacgccatgtggatgctatgaatgaatacaataaagctttggaaatagacaaacaaaacgtggaagctttggtagctcgtggagcattatatgcgacaaaaggaagtttgaacaaagcaatagaagattttgagcttgcattagaaaactgtccaactcacagaaatgcaagaaaatacctctgccagacacttgtagagagaggaggacagttagaagaagaagaaaagtttttaaatgctgaaagttactataagaaagctttggctttggatgagacttttaaagatgcagaggatgctttgcagaaacttcataaatatatgcagagaaaaacaagctgaaaaggaagaaaagcagaaaacaaagaaaatagaaacaagtgcagaaaagttgcgtaagctcttaaaagaagagaagaggctaaagaagaaaagaagaaaatcaacttcttcttcaagtgtttcttctgctgatgaatcagtgtcttcatcatcatcctcttcctcttctggtcacaaaaggcataagaaacataagaggaaccgttcagagtcttctcgcagttccagaaggcattcatctagggcatcctcaaatcagatagatcagaataggaaagatgagtgctacccagttccagctaatacttcagcatcttttcttaaccataaacaagaagtggagaaactactggggaagcaggataggttacagtatgaaaagacacagataaaagagaaagatagatgccctctctcttcatcttcacttgaaataccggatgattttggaggtaggtctgaagatccaagagatttttataacagctataaaacccaagcaggtagtagcaaaacagaaaagccatataaatcagaaagacatttttccagtagaagaaattcctcagattccttctgtaggaattcagaggacaagatttatggttataggagatttgaaaaggatatagagggaagaaaagagcactatagaaggtgggaaccaggttctgtgaggcattctacctcaccagcaagctcagaatactcttggaagtcagttgagaaatacaaaaaatacgctcactctggatcacgtgatttcagtagacatgagcaaagataccgtttaaatacaaatcaaggagaatatgaaagagaggacaattatggggaggatatcaaaacagaggttccagaagaagatgcactaagtagcaaagaacactcagaaagcagtgttaagaaaaatttacctcagaatttactgaatatatttaatcagatagctgaatttgaaaaagaaaaaggaaataagtcaaaaaattaatacaccaaggatatcggcaccattacacaaaatgcc

SEQ ID NO: 454 - protein, 434 aa, Homo sapiens
MDRDLLRQSLNCHGSSLLSLLRSEQQDNPHFRSLLGSAAEPARGPPPQHPLQGRKEKRVDNIEIQKFISKKADLLFALSWKSDAPATSEINEDSEDHYAIMPPLEQFMEIPSMDRRELFFRDIERGDIVIGRISSIREFGFFMVLICLGSGIMRDIAHLEITALCPLRDVPSHSNHGDPLSYYQTGDIIRAGIKDIDRYHEKLAVSLYSSSLPPHLSGIKLGVISSEELPLYYRRSVELNSNSLESYENVMQSSLGFVNPGVVEFLLEKLGIDESNPPSLMRGLQSKNFSEDDFASALRKKQSASWALKCVKIGVDYFKVGRHVDAMNEYNKALEIDKQNVEALVARGALYATKGSLNKAIEDFELALENCPTHRNARKYLCQTLVERGGQLEEEEKFLNAESYYKKALALDETFKDAEDALQKLHKYMQRKTS

SEQ ID NO: 455 - DNA, 790 bp, Homo sapiens
  CDS (1)..(765)
atggtgtcctggatgatctccagagccgtggtgctggtgtttggaatgctttatcctgcatattattcatacaaagctgtgaaaacaaaaaacgtgaaggaatatgttcgatggatgatgtactggattgtttttgctctctatactgtgattgaaacagtagccgatcaaacagttgcttggtttcccctgtactatgagctgaagattgcttttgtcatatggctgctttctccctataccaaaggagcaagtttaatatatagaaaattccttcatccacttctttcttcaaaggaaagggagattgatgattatattgtacaagcaaaggaacgaggctatgaaaccatggtaaactttggacggcaaggtttaaaccttgcagctactgctgctgttactgcagcagtaaagagccaaggagcaataactgaacgtttaagaagcttcagtatgcatgatttaacaactatccaaggtgatgagcctgtgggacaaagaccataccaacctctaccagaagcaaaaaagaaaagtaaaccagcccccagtgaatcagcaggttatggaattccactgaaagacggagatgagaaaacagatgaagaagcagaggggccatattcagataatgagatgttaacacacaaagggcttcgaagatcgcaaagcatgaaatctgtgaaaaccaccaaaggccgcaaagaggtgcggtacgggtcactaaaatacaaagtgaagaaacgaccacaagtgtatttttagtcatctacacgtcaaatatccc

SEQ ID NO: 456 - protein, 255 aa, Homo sapiens
MVSWMISRAVVLVFGMLYPAYYSYKAVKTKNVKEYVRWMMYWIVFALYTVIETVADQTVAWFPLYYELKIAFVIWLLSPYTKGASLIYRKFLHPLLSSKEREIDDYIVQAKERGYETMVNFGRQGLNLAATAAVTAAVKSQGAITERLRSFSMHDLTTIQGDEPVGQRPYQPLPEAKKKSKPAPSESAGYGIPLKDGDEKTDEEAEGPYSDNEMLTHKGLRRSQSMKSVKTTKGRKEVRYGSLKYKVKKRPQVYF

SEQ ID NO: 457 - DNA, 519 bp, Homo sapiens
  CDS (1)..(516)
atggaggcgcgcttcacgcgcgggaagtcggcgctgctggagcgcgcgctggcgcggccgcgcaccgaggtgagcctgagcgccttcgcactgctgttctccgagctggtacagcactgccagagccgcgtcttctccgtggccgagctgcagtcgcgcctggccgcgctgggccgccaggtgggcgcgcgcgtgctggatgcgctggtggcgcgcgaaaagggtgcccggcgtgagaccaaggtgctaggggcgttgctcttcgtcaagggcgccgtgtggaaggcgctcttcggcaaggaggcggacaagctggagcacgctcaactgcgccagcttcacggcgggcatcgtggaggcggtgctcacacacagcggcttccctgccaaggtcacggcgcactggcacaagggcaccacgctcatgatcaagttcgaggaggcagtcatcgctcgagaccgggccctggagggccgctgaccctgccggagataaaggatacagagagcccctcataa

SEQ ID NO: 458 - protein, 172 aa, Homo sapiens
MEARFTRGKSALLERALARPRTEVSLSAFALLFSELVQHCQSRVFSVAELQSRLAALGRQVGARVLDALVAREKGARRETKVLGALLFVKGAVWKALFGKEADKLEHAQLRQLHGGHRGGGAHTQRLPCQGHGALAQGHHAHDQVRGGSHRSRPGPGGPLTLPEIKDTESPS

SEQ ID NO: 459 - DNA, 972 bp, Homo sapiens
  CDS (1)..(948)
atgcgtccccactggcggccaacgggcagagcccatccccgggctcccagtcaccagtggtgcctgcaggcgctgtgtccacggggagctccagccccggcacaccccagcccgccccacagctgcccctcaatgctgccccaccatcctctgtgccccctgtaccaccctcagaggccctgcccccacctgcgtgcccctcagcccccgccccacggcgcagcatcatctctaggctgtttgggacgtcacctgccaccgaggcagcccctccacctccagagccagtcccggccgcagagggcccagcaacggtccagagtgtggaggactttgttcctgacgaccgcctggaccgcagcttcctggaagacacaacccccgccagggacgagaagaaggtgggggccaaggctgcccagcaggacagcgacagtgatggggaggccctgggcggcaacccgatggtggcagggttccaggacgatgtggacctcgaagaccagccacgtgggagtcccccgctgcctgcaggccccgtccccagtcaagacatcactctttcgagtgaggaggaagcagaagtggcagctcccacaaaaggccctgccccagctccccagcagtgctcagagccagagaccaagtggtcctccataccagcttcgaagccacggagggggacagctcccacgaggaccgcagcacccccctggccaggcggtgtctctgttcgcacaggtccggagaagcgcagcagcaccaggccccctgctgagatggagccggggaagggtgagcaggcctcctcgtcggagagtgaccccgagggacccattgctgcacaaatgctgtccttcgtcatggatgaccccgactttgagagcgagggatcagacacacagcgcagggcggatgactttcccgtgcgagatgacccctccgatgtgactgacgaggatgagggccctg

SEQ ID NO: 460 - protein, 316 aa, Homo sapiens
MRPHWRPTGRAHPRAPSHQWCLQALCPRGAPAPAHPSPPHSCPSMLPHHPLCPLYHPQRPCPHLRAPQPPPHGAASSLGCLGRHLPPRQPLHLQSQSRPQRAQQRSRVWRTLFLTTAWTAASWKTQPPPGTRRRWGPRLPSRTATVMGRPWAATRWWQGSRTMWTSKTSHVGVPRCLQAPSPVKTSLFRVRRKQKWQLPQKALPQLPSSAQSQRPSGPPYQLRSHGGGQLPRGPQHPPGQAVSLFAQVRRSAAAPGPLLRWSRGRVSRPPRRRVTPRDPLLHKCCPSSWMTPTLRARDQTHSAGRMTFPCEMTPPM

SEQ ID NO: 461 - DNA, 2250 bp, Homo sapiens
  CDS (1)..(2190)
atgttttccgccctgaagaagctggtggggtcggaccaggccccgggccgggacaagaacatccccgccgggctgcagtccatgaaccaggcgttgcagaggcgcttcgccaagggggtgcagtacaacatgaagatagtgatccggggagacaggaacacgggcaagacagcgctgtggcaccgcctgcagggccggccgttcgtggaggagtacatccccacacaggagatccaggtcaccagcatccactggagctacaagaccacggatgacatcgtgaaggttgaagtctgggatgtagtagacaaaggaaaatgcaaaaagcgaggcgacggcttaaagatggagaacgacccccaggaggcggagtctgaaatggccctggatgctgagttcctggacgtgtacaagaactgcaacggggtggtcatgatgttcgacattaccaagcagtggaccttcaattacattctccgggagcttccaaaagtgcccacccacgtgccagtgtgcgtgctggggaactaccgggacatgggcgagcaccgagtcatcctgccggacgacgtgcgtgacttcatcgacaacctggacagacctccaggttcctcctacttccgctatgctgagtcttccatgaagaacagcttcggcctaaagtaccttcataagttcttcaatatcccatttttgcagcttcagagggagacgctgttgcggcagctggagacgaaccagctggacatggacgccacgctggaggagctgtcggtgcagcaggagacggaggaccagaactacggcatcttcctggagatgatggaggctcgcagccgtggccatgcgtccccactggcggccaacgggcagagcccatccccgggctcccagtcaccagtggtgcctgcaggcgctgtgtccacggggagctccagccccggcacaccccagcccgccccacagctgcccctcaatgctgccccaccatcctctgtgccccctgtaccaccctcagaggccctgcccccacctgcgtgcccctcagcccccgccccacggcgcagcatcatctctaggctgtttgggacgtcacctgccaccgaggcagcccctccacctccagagccagtcccggccgcagagggcccagcaacggtccagagtgtggaggactttgttcctgacgaccgcctggaccgcagcttcctggaagacacaacccccgccagggacgagaagaaggtgggggccaaggctgcccagcaggacagcgacagtgatggggaggccctgggcggcaacccgatggtggcagggttccaggacgatgtggacctcgaagaccagccacgtgggagtcccccgctgcctgcaggccccgtccccagtcaagacatcactctttcgagtgaggaggaagcagaagtggcagctcccacaaaaggccctgccccagctccccagcagtgctcagagccagagaccaagtggtcctccataccagcttcgaagccacggagggggacagctcccacgaggaccgcagcacccccctggccaggcggtgtctctgttcgcacaggtccggagaagcgcagcagcaccaggccccctgctgagatggagccggggaagggtgagcaggcctcctcgtcggagagtgaccccgagggacccattgctgcacaaatgctgtccttcgtcatggatgaccccgactttgagagcgagggatcagacacacagcgcagggcggatgactttcccgtgcgagatgacccctccgatgtgactgacgaggatgagggccctgccgagccgcccccaccccccaagctccctctccccgccttcagactgaagaatgactcggacctcttcgggctggggctggaggaggccggacccaaggagagcagtgaggaaggtaaggagggcaaaaccccctctaaggagaagaagaagaagaagaagaaaaaaggcaaagaggaagaagaaaaagctgccaagaagaagagcaaacacaagaagagcaaggacaaggaggagggcaaggaggagcggcgacggcggcagcagcggcccccgcgcagcagggagaggacggctgccgatgagctggaggctttcctggggggcggggccccgggcggccgccaccctgggggtggcgactacgaggagctctaggccggcgtgggcagtggccgccctggggcggggggcgtgcctgtcactgcctgggga

SEQ ID NO: 462 - protein, 730 aa, Homo sapiens
MFSALKKLVGSDQAPGRDKNIPAGLQSMNQALQRRFAKGVQYNMKIVIRGDRNTGKTALWHRLQGRPFVEEYIPTQEIQVTSIHWSYKTTDDIVKVEVWDVVDKGKCKKRGDGLKMENDPQEAESEMALDAEFLDVYKNCNGVVMMFDITKQWTFNYILRELPKVPTHVPVCVLGNYRDMGEHRVILPDDVRDFIDNLDRPPGSSYFRYAESSMKNSFGLKYLHKFFNIPFLQLQRETLLRQLETNQLDMDATLEELSVQQETEDQNYGIFLEMMEARSRGHASPLAANGQSPSPGSQSPVVPAGAVSTGSSSPGTPQPAPQLPLNAAPPSSVPPVPPSEALPPPACPSAPAPRRSIISRLFGTSPATEAAPPPPEPVPAAEGPATVQSVEDFVPDDRLDRSFLEDTTPARDEKKVGAKAAQQDSDSDGEALGGNPMVAGFQDDVDLEDQPRGSPPLPAGPVPSQDITLSSEEEAEVAAPTKGPAPAPQQCSEPETKWSSIPASKPRRGTAPTRTAAPPWPGGVSVRTGPEKRSSTRPPAEMEPGKGEQASSSESDPEGPIAAQMLSFVMDDPDFESEGSDTQRRADDFPVRDDPSDVTDEDEGPAEPPPPPKLPLPAFRLKNDSDLFGLGLEEAGPKESSEEGKEGKTPSKEKKKKKKKKGKEEEEKAAKKKSKHKKSKDKEEGKEERRRRQQRPPRSRERTAADELEAFLGGGAPGGRHPGGGDYEEL

SEQ ID NO: 463 - DNA, 2717 bp, Homo sapiens
  CDS (1)..(2649)
atggctgaaaatagtgtattaacatccactactgggaggactagcttggcagactcttccatttttgattctaaagttactgagatttccaaggaaaacttacttattggatctacttcatatgtagaagaagagatgcctcagattgaaacaagagtgatattggttcaagaagctggaaaacaagaagaacttataaaagccttaaaggacattaaagtgggctttgtaaagatggagtcagtggaagaatttgaaggtttggattctccggaatttgaaaatgtatttgtagtcacggactttcaggattctgtctttaatgacctctacaaggctgattgtagagttattggaccaccagttgtattaaattgttcacaaaaaggagagcctttgccattttcatgtcgcccgttgtattgtacaagtatgatgaatctagtactatgctttactggatttaggaaaaaagaagaactagtcaggttggtgacattggtccatcacatgggtggagttattcgaaaagactttaattcaaaagttacacatttggtggcaaattgtacacaaggagaaaaattcagggttgctgtgagtctaggtactccaattatgaagccagaatggatttataaagcttgggaaaggcggaatgaacaggatttctatgcagcagttgatgactttagaaatgaatttaaagttcctccatttcaagattgtattttaagtttcctgggattttcagatgaagagaaaaccaatatggaagaaatgactgaaatgcaaggaggtaaatatttaccgcttggagatgaaagatgcactcaccttgtagttgaagagaatatagtaaaagatcttccctttgaaccttcaaagaaactttatgttgtcaagcaagagtggttctggggaagcattcaaatggatgcccgagctggagaaactatgtatttatatgaaaaggcaaatactcctgagctcaagaaatcagtgtcaatgctttctctaaatacccctaacagcaatcgcaaacgacgtcgtttaaaagaaacacttgctcagctttcaagagagacagacgtgtcaccatttccaccccgtaagcgcccatcagctgagcattccctttccatagggtcactcctagatatctccaacacaccagagtctagcattaactatggagacaccccaaagtcttgtactaagtcttctaaaagctccactccagttccttcaaagcagtcagcaaggtggcaagttgcaaaagagctttatcaaactgaaagtaattatgttaatatattggcaacaattattcagttatttcaagtaccattggaagaggaaggacaacgtggtggacctatccttgcaccagaggagattaagactatttttggtagcatcccagatatctttgatgtacacactaagataaaggatgatcttgaagaccttatagttaattgggatgagagcaaaagcattggtgacatttttctgaaatattcaaaagatttggtaaaaacctaccctccctttgtaaacttctttgaaatgagcaaggaaacaattattaaatgtgaaaaacagaaaccaagatttcatgcttttctcaagataaaccaagcaaaaccagaatgtggacggcagagccttgttgaacttcttatccgaccagtacagaggttacccagtgttgcattacttttaaatgatcttaagaagcatacagctgatgaaaatccagacaaaagcactttagaaaaagctattggatcactgaaggaagtaatgacgcatattaatgaggataagagaaaaacagaagctcaaaagcaaatttttgatgttgtttatgaagtagatggatgcccagctaatcttttatcttctcaccgaagcttagtacagcgggttgaaacaatttctctaggtgagcacccctgtgacagaggagaacaagtaactctcttcctcttcaatgattgcctagagatagcaagaaaacggcacaaggttattggcacttttaggagtcctcatggccaaacccgacccccagcttctcttaagcatattcacctaatgcctctttctcagattaagaaggtattggacataagagagacagaagattgccataatgcttttgccttgcttgtgaggccaccaacagagcaggcaaatgtgctactcagtttccagatgacatcagatgaacttccaaaagaaaactggctaaagatgctgtgtcgacatgtagctaacaccatttgtaaagcagatgctgagaatcttatttatactgctgatccagaatcctttgaagtaaatacaaaagatatggacagtacattgagtagagcatcaagagcaataaaaaagacttcaaaaaaggttacaagagcattctctttctccaaaactccaaaaagagctcttcgaagggctcttatgacatcccacggctcagtggagggaagaagtccttccagcaatgataagcatgtaatgagtcgtctttctagcacatcatcattagcaggtatcccttctccctcccttgtcagccttccttccttctttgaaaggagaagtcatacgttaagtagatctacaactcatttgatatgaagcgttaccaaaatcttaaattatagaaatgtatagacacctcatactcaaataagaaactgact

SEQ ID NO: 464 - protein, 883 aa, Homo sapiens
MAENSVLTSTTGRTSLADSSIFDSKVTEISKENLLIGSTSYVEEEMPQIETRVILVQEAGKQEELIKALKDIKVGFVKMESVEEFEGLDSPEFENVFVVTDFQDSVFNDLYKADCRVIGPPVVLNCSQKGEPLPFSCRPLYCTSMMNLVLCFTGFRKKEELVRLVTLVHHMGGVIRKDFNSKVTHLVANCTQGEKFRVAVSLGTPIMKPEWIYKAWERRNEQDFYAAVDDFRNEFKVPPFQDCILSFLGFSDEEKTNMEEMTEMQGGKYLPLGDERCTHLVVEENIVKDLPFEPSKKLYVVKQEWFWGSIQMDARAGETMYLYEKANTPELKKSVSMLSLNTPNSNRKRRRLKETLAQLSRETDVSPFPPRKRPSAEHSLSIGSLLDISNTPESSINYGDTPKSCTKSSKSSTPVPSKQSARWQVAKELYQTESNYVNILATIIQLFQVPLEEEGQRGGPILAPEEIKTIFGSIPDIFDVHTKIKDDLEDLIVNWDESKSIGDIFLKYSKDLVKTYPPFVNFFEMSKETIIKCEKQKPRFHAFLKINQAKPECGRQSLVELLIRPVQRLPSVALLLNDLKKHTADENPDKSTLEKAIGSLKEVMTHINEDKRKTEAQKQIFDVVYEVDGCPANLLSSHRSLVQRVETISLGEHPCDRGEQVTLFLFNDCLEIARKRHKVIGTFRSPHGQTRPPASLKHIHLMPLSQIKKVLDIRETEDCHNAFALLVRPPTEQANVLLSFQMTSDELPKENWLKMLCRHVANTICKADAENLIYTADPESFEVNTKDMDSTLSRASRAIKKTSKKVTRAFSFSKTPKRALRRALMTSHGSVEGRSPSSNDKHVMSRLSSTSSLAGIPSPSLVSLPSFFERRSHTLSRSTTHLI

SEQ ID NO: 465 - DNA, 3744 bp, Homo sapiens
  CDS (1)..(3735)
atgatgaggaaggaagaagagaagggtggcacccatgtcaatgatgtcttaaaccagcgtgacgcccttgggcgggtccttgtcaacctaaaccaccctccagaggaggaaaatgtcttccttgccccacagttggcacgggctgtgaaacctcatcagattggcgggatccggttcctttacgataacctagtggagtctctggagaggtttaagaccagcagtggctttggctgtattctggcccacagcatgggtctggggaaaactttgcaagtgatctctttcatcgacgtcctcttccgccacacgccagccaaaacagtccttgccattgtgccggttaatactcttcagaattggctggcagagttcaacatgtggcttccacctcctgaagccctcccggctgacaacaagcctgaagaagtccagcctcggttctttaaagttcacatcttgaatgatgagcacaagacgatggcatctcgtgctaaagtgatggctgattgggtgtcagagggtggcgtgctgctgatggggtacgagatgtacagactcctcactctgaagaaatcatttgccacaggtagaccgaagaaaaccaagaagcgttctcacccagtcatcattgatctagatgaggaagatcggcagcaggagtttcggagagagtttgagaaggctttatgccgccctggccctgatgtagtaatctgtgatgagggacaccgcatcaaaaactgccaggccagcacctcacaggctctgaagaatatccgctctcgccgccgggtggtgctgactgggtaccctctgcaaaacaacctcattgagtactggtgcatggtggactttgtgcgcccagacttccttggcacccggcaggagttcagcaacatgtttgaacgccctatcctgaatgggcaatgtattgacagcacacctcaggacgtccgcctcatgcggtaccggagccatgtcctgcacagtcttctggagggctttgtgcagaggagaggccacactgtgctgaagattcatctccctgccaaggaagaaaatgtgatccttgtgcggctctccaagatccagcgagatttgtatacacagttcatggatcgcttccgggactgtggtagcagcggttggctggggctgaacccccttaaggcattctgtgtgtgttgcaagatctggaatcaccctgatgtgctgtatgaagcccttcagaaggagagcttggccaatgagcaggacctagacgtggaagaacttggctctgcagggaccagtgcccgctgtccaccacagggaacaaaaggcaagggagaggatagcaccttggcttcctcgatgggagaggcaaccaatagcaagttcctacagggcgttggcttcaaccctttccaggagcgaggcaacaacattgtcacatatgaatgggccaaggaccttctgactaattaccagactggagtcctagaaaactctcccaagatggtactgcttttccacctgattgaggaaagtgtgaagcttggggacaagatccttgtgtttagccagagtctttccaccttggctctcatcgaggaattccttggaaaacgagaagtaccctgtccacctggtaccgaggggcaaggagcacagaagtgggttcgaaacatcagctacttccggctagatggtagcacccctgcctttgagagggagcggcttattaatcagttcaatgatcccagcaacctcaccacctggctgttccttctctctacaagggccggatgcttgggtgtgaatctgattggtgccaaccgagtggtggtgtttgatgcttcctggaacccttgccatgatgcccaggcagtatgtcgggtataccgttatggccagaaaaagccctgttacatctatcgccttgtggctgattacactctagaaaagaagatctatgaccgtcagatttccaagcagggcatgtcagatcgggtggtggatgatctaaatccaatgctgaacttcacacggaaagaggtggaaaacctactgcactttgttgagaaggagccagctccccaagtttccttgaacgtaaaggggatcaaggagtcagtcctgcaactggcctgtctgaagtaccctcacctcatcaccaaggagcctttcgagcatgagtcattgctcttgaaccgaaaggatcacaagctaaccaaggctgagaaaaaagcagcaaagaaaagctatgaggaagacaaacgcacatcagtcccctatacccgcccatcgtatgcgcagtattaccctgccagcgatcagagcctgaccagcatccccgccttcagccagagaaactggcagccaactttgaagggtgatgaaaagcctgtggccagtgttcgtcctgtgcagtccacccccatccccatgatgccccggcatgtcccattgggaggaagtgtaagctctgcctccagcacaaatccatccatgaactttcccatcaactacttgcagcgtgcaggagtccttgtgcagaaggtggtcaccacgacagatattgttattcctggactcaacagctccacagatgtacaggcaagaattaatgctggtgagagcatccacatcatccgtgggacaaaagggacgtacatccgtaccagtgatggacggatctttgctgtccgggcaactggcaaaccaaaggttcctgaagatggtcggatggctgcctcaggttcccagggaccttcttgcgagtccacaagcaacggcagacacagtgcctcatcacccaaagcccccgaccctgaggggctggccaggcccgtctctcctgacagcccagagatcatcagtgagcttcagcagtatgcagatgtggctgctgcccgggaatcccgtcagagctccccaagcaccaatgccgccctgcctggccccccggcccaacttatggacagcagtgctgttcccgggacagctctcggaactgagcctcgactagggggtcattgcctcaatagttccctcttggtgactggccagccctgtggtgacaggcacccagtgctggacttaaggggccacaagcgaaagttggccacaccacctgctgcccaggagtcatcccgccggcggtccaggaagggtcatctgccagcccccgtgcagccgtatgaacacgggtatccagtctctggcgggtttgccatgccacccgtctccttaaaccataacctcaccacccccttcacctcccaggctggggagaactccctgtttatgggcagtaccccctcctactaccagctgtccaatttgctggcagatgcccgcctggtgtttccagtgactactgaccctctggtgccagcaggccccgtcagttcctcttccacggctacctcagtcactgccagcaacccctccttcatgctcaacccttctgtgccagggatactacccagctattcactcccattctcacagccactcctgtccgagccgaggatgtttgcgccttttccttcccctgtcttgcccagcaacctttcgcggggcatgtctatctatccaggctacatgtccccacatgcaggctacccagctggtggcctcctacggtcccaggtgcctccatttgactctcatgaggttgccgaggttgggttcagctccaatgatgatgaggataaagacgatgatgtgatagaggtcactgggaaatagctaggg

SEQ ID NO: 466 - protein, 1245 aa, Homo sapiens
MMRKEEEKGGTHVNDVLNQRDALGRVLVNLNHPPEEENVFLAPQLARAVKPHQIGGIRFLYDNLVESLERFKTSSGFGCILAHSMGLGKTLQVISFIDVLFRHTPAKTVLAIVPVNTLQNWLAEFNMWLPPPEALPADNKPEEVQPRFFKVHILNDEHKTMASRAKVMADWVSEGGVLLMGYEMYRLLTLKKSFATGRPKKTKKRSHPVIIDLDEEDRQQEFRREFEKALCRPGPDVVICDEGHRIKNCQASTSQALKNIRSRRRVVLTGYPLQNNLIEYWCMVDFVRPDFLGTRQEFSNMFERPILNGQCIDSTPQDVRLMRYRSHVLHSLLEGFVQRRGHTVLKIHLPAKEENVILVRLSKIQRDLYTQFMDRFRDCGSSGWLGLNPLKAFCVCCKIWNHPDVLYEALQKESLANEQDLDVEELGSAGTSARCPPQGTKGKGEDSTLASSMGEATNSKFLQGVGFNPFQERGNNIVTYEWAKDLLTNYQTGVLENSPKMVLLFHLIEESVKLGDKILVFSQSLSTLALIEEFLGKREVPCPPGTEGQGAQKWVRNISYFRLDGSTPAFERERLINQFNDPSNLTTWLFLLSTRAGCLGVNLIGANRVVVFDASWNPCHDAQAVCRVYRYGQKKPCYIYRLVADYTLEKKIYDRQISKQGMSDRVVDDLNPMLNFTRKEVENLLHFVEKEPAPQVSLNVKGIKESVLQLACLKYPHLITKEPFEHESLLLNRKDHKLTKAEKKAAKKSYEEDKRTSVPYTRPSYAQYYPASDQSLTSIPAFSQRNWQPTLKGDEKPVASVRPVQSTPIPMMPRHVPLGGSVSSASSTNPSMNFPINYLQRAGVLVQKVVTTTDIVIPGLNSSTDVQARINAGESIHIIRGTKGTYIRTSDGRIFAVRATGKPKVPEDGRMAASGSQGPSCESTSNGRHSASSPKAPDPEGLARPVSPDSPEIISELQQYADVAAARESRQSSPSTNAALPGPPAQLMDSSAVPGTALGTEPRLGGHCLNSSLLVTGQPCGDRHPVLDLRGHKRKLATPPAAQESSRRRSRKGHLPAPVQPYEHGYPVSGGFAMPPVSLNHNLTTPFTSQAGENSLFMGSTPSYYQLSNLLADARLVFPVTTDPLVPAGPVSSSSTATSVTASNPSFMLNPSVPGILPSYSLPFSQPLLSEPRMFAPFPSPVLPSNLSRGMSIYPGYMSPHAGYPAGGLLRSQVPPFDSHEVAEVGFSSNDDEDKDDDVIEVTGK

SEQ ID NO: 467 - DNA, 4189 bp, Homo sapiens
  CDS (1)..(4185)
atgtaccctatctgtacagttgttgtggatggtttgccatctgaaagctcctcaagttcttatccaggccctgtgtctgtttctgaaatgtctctgcttcatgctttgggtccagtgcagacctggctgggacaagagctcgagaaatgtggcattgatgccatgatttacactcggtatgtcctcagtcttctgctgcatgacagctatgactacgacctgcaggaacaggagaatgacatcttcctgggctgggaaaaaggagcttataagaaatggggaaagagtaagaaaaaatgttcagatctaactctagaagaaatgaaaaaacaggctgctgtccagtgtcttcgatctgcttctgatgaaagctctggtatcgagactttagtggaggagctctgctccagactgaaagaccttcagagtaagcaagaagagaagattcacaaaaagttagaggggtctccctctccagaggcagaattatcccctccagcaaaggatcaagtggaaatgtactatgaagcatttccaccactttctgagaaaccagtttgcctgcaagaaatcatgactgtgtggaacaagtctaaagtctgttcttactctagctcttcttcatcatccacagccccaccagctagcacagatacttcctctcctaaggactgcaacagtgaaagtgaagtcaccaaggaaagaagcagtgaagtacccaccactgtgcatgagaaaacccagagcaaaagcaaaaacgagaaggaaaacaaatttagtaatggcacaattgaagaaaagcctgctttgtacaaaaagcaaatccgacataaacctgaaggaaagattcgccctcgctcgtggtcttctggctccagtgaagcaggctcaagttccagtgggaatcagggagaattaaaagcatccatgaagtatgttaaagtaagacacaaggcacgagagattcgaaacaaaaaagggcggaatgggcaaagcaggctttctttgaagcacggtgaaaaggctgaaaggaacattcatactggaagtagtagcagtagcagcagtggttctgtcaaacagctgtgcaagcggggtaagagacctttaaaagaaatagggagaaaagatcctgggagcactgaaggaaaagacctgtacatggagaatagaaaggacacagagtataaagaggagcccttgtggtacaccgagccaattgctgaatattttgttcctctgagcagaaaaagtaaactagagaccacataccgaaacagacaggatacaagtgatctgacatcagaggcagtggaagaattgtctgaatcagtgcatggtctttgtatcagcaacaataatcttcataaaacatacctcgcagcaggtactttcattgatggtcattttgtagaaatgcctgcagttataaatgaggatattgacctcactgggacctcattatgttctctaccagaggacaataaatacctggatgatattcatctatcagaattaacgcacttctatgaagtggatattgatcaatccatgttggatcctggtgcctcagaaacaatgcaaggagaaagtcggattttgaatatgattcgacagaaaagcaaagagaacacagattttgaggcagaatgttgcatagtgttagatggtatggagttgcaaggggaacgtgcaatatggacagattctaccagctccgtaggtgctgagggcttattcctgcaggaccttggcaatctggctcagttttgggagtgctgttcatccagctccggtgatgctgatggggagagttttggaggagactctccagttagactctctcccatcttagacagcacagtgctcaattcacacctgcttgctggcaatcaagagctcttttcagatattaatgaaggatctggtataaactcttgtttttcagtgtttgaagtgcaatgcagtaattctgttttaccattttcttttgaaacactcaacttgggaaatgaaaatacagattctagtgctaatatgcttgggaaaacacagtctagattgctaatatggaccaaaaatagtgcctttgaagaaaatgaacactgttctaatctttcaacaagaacttgtagtccatggtcccattcagaagaaacacgttcagacaatgaaacattaaatattcagtttgaagaatccacacagtttaatgccgaagatattaattatgtagttcctagagtctcgtcaaattatgtagatgaagaacttctagattttttgcaagatgaaacttgccagcaaaacagtagaactttaggtgagattcctacattagttttcaaaaaaacatctaaactagaatccgtctgtggtattcagctagaacaaaaaacagaaaacaaaaattttgaaactacacaagtatgtaatgaaagtccacatggagatggctacagctcaggggttattaaagacatttggacaaagatggcagacacaaattctgtggctacagtagaaatagaaagaactgatgctgagttgttttcggcagatgtaaataactactgctgctgtctagatgctgaagctgaactggagacccttcaggagcctgataaggctgtgcggaggtcagagtaccatctgtgggagggacagaaagagagcctggagaaaagagcatttgcttctagtgagctatcaaacgtggatggtggtgattatacaacaccctctaaaccctgggatgtagcccaagataaagaaaacacattcattcttggaggagtttatggagaactcaaaaccttcaatagtgatggggagtgggcagtcgtaccacctagtcacacaaaaggaagtctgttacagtgtgcagcttctgatgttgtgacgatagctggtacagatgtctttatgaccccaggaaacagttttgctcctgggcacaggcagttatggaaacccttcgtgtcatttgaacagaatgatcagccgaagagtggggaaaatgggttaaataagggattttcttttatcttccatgaagacttactaggagcttgtggcaactttcaagtcgaagatcctggacttgaatactcattttcttcctttgacttaagcaatccattttcacaagttcttcatgtagaatgctcatttgaacctgaagggattgcatctttcagccccagttttaaaccgaaatcaatcctctgttctgattcagacagtgaagtgtttcaccccaggatatgtggtgttgacagaacacaatacagggctattcggatctctcctcggactcactttcgcccaatttctgcatccgaactgtccccaggaggaggaagcgagtcagaatttgaatctgagaaagatgaagcaaatattcccattccttctcaagttgatatatttgaagatccgcaggcagatctcaaacctttggaagaagatgcagagaaagaaggccattactatggaaaatcagagcttgagtctggaaaattccttcccaggttaaaaaaatctgggatggaaaagagtgctcagacatcactggattcccaggaggaatcaactgggattctttcagtaggaaagcaaaatcagtgtttggaatgtagcatgaatgaatccctggaaatagatttagaaagctcagaagcaaattgtaaaataatggcacaatgcgaggaagaaattaataatttttgtggttgcaaagcaggttgtcagtttcctgcttatgaagataatccagtttcttcgggacagctggaagagttccctgtattgaacactgatatacaaggaatgaatagaagtcaagaaaaacagacctggtgggaaaaagccttgtactctcctctttttcctgcatcagagtgtgaagaatgttacacaaatgccaagggagagagtggtttagaagaatatccagatgctaaagagacacccagtaatgaagagcgcctgttagattttaatagggtgtcttctgtttatgaagcaagatgtacaggagagagagattctggagcaaagtcagatggcttccgcggaaagatgtgctccagcgccagctccacctcggaagagacaggctcagaaggcggaggcgagtgggtgggccctagtgaagaggagctcttttctcgaactcatctctaaa

SEQ ID NO: 468 - protein, 1395 aa, Homo sapiens
MYPICTVVVDGLPSESSSSSYPGPVSVSEMSLLHALGPVQTWLGQELEKCGIDAMIYTRYVLSLLLHDSYDYDLQEQENDIFLGWEKGAYKKWGKSKKKCSDLTLEEMKKQAAVQCLRSASDESSGIETLVEELCSRLKDLQSKQEEKIHKKLEGSPSPEAELSPPAKDQVEMYYEAFPPLSEKPVCLQEIMTVWNKSKVCSYSSSSSSSTAPPASTDTSSPKDCNSESEVTKERSSEVPTTVHEKTQSKSKNEKENKFSNGTIEEKPALYKKQIRHKPEGKIRPRSWSSGSSEAGSSSSGNQGELKASMKYVKVRHKAREIRNKKGRNGQSRLSLKHGEKAERNIHTGSSSSSSSGSVKQLCKRGKRPLKEIGRKDPGSTEGKDLYMENRKDTEYKEEPLWYTEPIAEYFVPLSRKSKLETTYRNRQDTSDLTSEAVEELSESVHGLCISNNNLHKTYLAAGTFIDGHFVEMPAVINEDIDLTGTSLCSLPEDNKYLDDIHLSELTHFYEVDIDQSMLDPGASETMQGESRILNMIRQKSKENTDFEAECCIVLDGMELQGERAIWTDSTSSVGAEGLFLQDLGNLAQFWECCSSSSGDADGESFGGDSPVRLSPILDSTVLNSHLLAGNQELFSDINEGSGINSCFSVFEVQCSNSVLPFSFETLNLGNENTDSSANMLGKTQSRLLIWTKNSAFEENEHCSNLSTRTCSPWSHSEETRSDNETLNIQFEESTQFNAEDINYVVPRVSSNYVDEELLDFLQDETCQQNSRTLGEIPTLVFKKTSKLESVCGIQLEQKTENKNFETTQVCNESPHGDGYSSGVIKDIWTKMADTNSVATVEIERTDAELFSADVNNYCCCLDAEAELETLQEPDKAVRRSEYHLWEGQKESLEKRAFASSELSNVDGGDYTTPSKPWDVAQDKENTFILGGVYGELKTFNSDGEWAVVPPSHTKGSLLQCAASDVVTIAGTDVFMTPGNSFAPGHRQLWKPFVSFEQNDQPKSGENGLNKGFSFIFHEDLLGACGNFQVEDPGLEYSFSSFDLSNPFSQVLHVECSFEPEGIASFSPSFKPKSILCSDSDSEVFHPRICGVDRTQYRAIRISPRTHFRPISASELSPGGGSESEFESEKDEANIPIPSQVDIFEDPQADLKPLEEDAEKEGHYYGKSELESGKFLPRLKKSGMEKSAQTSLDSQEESTGILSVGKQNQCLECSMNESLEIDLESSEANCKIMAQCEEEINNFCGCKAGCQFPAYEDNPVSSGQLEEFPVLNTDIQGMNRSQEKQTWWEKALYSPLFPASECEECYTNAKGESGLEEYPDAKETPSNEERLLDFNRVSSVYEARCTGERDSGAKSDGFRGKMCSSASSTSEETGSEGGGEWVGPSEEELFSRTHL

SEQ ID NO: 469 - DNA, 4088 bp, Homo sapiens
  CDS (1)..(4062)
atgtcactgcctcggggtatttcacaagacaggtcacctcttgtgaaagtccgaagtaattctctgaaagctccttccacgcatgtcacaaaaccatcatttagccagaaatcatttgtttctatcaaagaccaaagaccagtaaatcacttgcatcagaacagtctgttgaatcagcagacatgggtaaggactgacagtgcccccgatcagcaagtggagactgggaaatccccctctttatctggagcctctgccaagcctgcccctcagtcgagtgaaaacgctggtacttcagatttagaactacctgtcagtcaaaggagtcaagatttaagtttacaagaggctgaaactgagcaatcagatactttagataataaagaagctgtcatcctaagggaaaaacctccatctggacgccagacaccgcagcctttaaggcatcagtcttacatcttggcagtaaatgaccaggagaccgggtcagacactacctgctggctgcccaatgatgcacgtcgagaggtccacataaaaagaatggaggaaagaaaagcctcgagtaccagtccgcctggcgattctttggcttccatcccatttatagatgaaccaactagccctagcattgatcatgatattgcacatatccctgcctctgctgttatatcagcctctacctctcaggtcccctccatagcaacagttcctccttgcctcacaacttcagctccattaattcgccgtcagctctcacatgaccacgaatctgttggccctcctagcctggatgctcagcccaactcaaagacagaaagatcaaaatcatatgatgagggtctggatgattacagagaagatgcaaaattgtcctttaagcacgtatctagtctgaagggaatcaagatcgcagacagccaaaagtcatcagaagactctgggtccagaaaagattcttcctcagaggtcttcagtgatgctgccaaggaagggtggcttcatttccgaccccttgtcaccgataagggcaagcgagttggtggaagtattcggccatggaaacagatgtatgttgtccttcggggtcattcactttacctgtacaaagataaaagagagcagacgactccgtctgaggaagagcagcccatcagtgttaatgcttgcttgatagacatctcttacagtgagaccaagaggaaaaatgtgtttcgactcaccacgtccgactgtgaatgcctgtttcaggctgaagacagagatgatatgctagcttggatcaagacgatccaggagagcagcaacctaaacgaagaggacactggagtcactaacagggatctaattagtcgaagaataaaagaatacaacaatctgatgagcaaagcagaacagttgccaaaaacacctcgccagagtctcagcatcaggcaaactttgcttggtgctaaatcagagccaaagactcaaagcccacactctccgaaggaagagtcggaaaggaaacttctcagtaaagatgataccagtcccccaaaagacaaaggcacatggagaaaaggcattccaagtatcatgagaaagacatttgagaaaaagccaactgctacaggaactttcggcgtccgactagatgactgcccaccagctcatactaatcggtatattccattaatagttgacatatgttgcaaattagttgaagaaagaggtcttgaatatacaggtatttatagagttcctggaaataatgcagccatctcaagtatgcaagaagaactcaacaagggaatggctgatattgatatacaagatgataaatggcgagatttgaatgtgataagcagtttactaaaatccttcttcagaaaactccctgagcctctcttcacaaatgataaatatgctgattttattgaagccaatcgtaaagaagatcctctagatcgtctgaaaacattaaaaagactaattcacgatttgcctgaacatcattatgaaacacttaagttcctttcagctcatctgaagacagtggcagaaaattcagaaaaaaataagatggaaccaagaaacctagcaatagtgtttggtcccacccttgttcgaacatcagaagacaacatgacccacatggtcacccacatgcctgaccagtacaagattgtagaaacgctcatccagcaccatgactggtttttcacagaagaaggtgctgaagagcctcttacaacagtgcaggaggaaagcacagtagactcccagccagtgccaaacatagatcatttactcaccaacattggaaggacaggagtctccccaggagatgtatcagattcagctactagtgactcaacaaaatctaagggttcttggggatctggaaaggatcagtatagcagggaactgcttgtgtcctccatctttgcagctgctagtcgcaagaggaagaagccgaaagaaaaagcacagcctagcagctcagaagatgaactggacaatgtattttttaagaaagaaaatgtggaacagtgtcacaatgatactaaagaggagtccaaaaaagaaagtgagacactgggcagaaaacagaagatcatcattgccaaagaaaacagcactaggaaagaccccagcacgacaaaagatgaaaagatatcactaggaaaagagagcacgccttctgaagaaccctcaccaccacacaactcaaaacacaacaagtcaccaactctcagctgtcgctttgccatcctgaaagagagccccaggtcacttctggcacagaagtcctcccaccttgaagagacaggctctgactctggcactttgctcagcacgtcttcccaggcctccctggcaaggttttccatgaagaaatcaaccagtccagaaacgaaacatagcgagtttttggccaacgtcagcaccatcacctcagattattccaccacatcgtctgctacatacttgactagcctggactccagtcgactgagccctgaggtgcaatccgtggcagagagcaagggggacgaggcagatgacgagagaagcgaactcatcagtgaagggcggcctgtggaaaccgacagcgagagcgagtttcccgtgttccccacagccttgacttcagagaggcttttccgaggaaaactgcaagaagtgactaagagcagccggagaaattctgaaggaagtgaattaagttgcaccgagggaagtttaacatcaagtttagatagccggagacagctcttcagttcccataaactcatcgaatgtgatactctttccaggaaaaaatcagctagattcaagtcagatagtggaagtctaggagatgccaagaatgagaaagaagcaccttcgttaactaaagtgtttgatgttatgaaaaaaggaaagtcaactgggagtttactgacacccaccagaggcgaatccgaaaaacaggaacccacatggaaaacgaaaatagcagatcggttaaaactgagacccagagcccctgcggatgacatgtttggagtagggaatcacaaagtgaatgccgagactgctaaaaggaaaagcatccggcgcagacatacactaggagggcacagagatgctaccgaaatcagcgttttgaatttttggaaagtgcatgagcagagcggggagagagaatctgaactttcagctgtaaaccggttaaaaccaaaatgctcagcccaggacctttccatctcagactggctggccagggaacgcctacgcaccagtacctctgaccttagcagaggagaaatcggagatccccagacagagaacccaagcacacgagaaatagccacgaccgacacacctttgtctcttcattgcaacacaggcagttcttccagcaccttggcttcaacaaacaggccccttctttccataccaccacagtcacctgaccaaataaacggagaaagcttccagaacgtgagcaaaaatgctagttctgcagcgaatgcccaacctcataaactgtctgaaaccccaggcactaaagcagagtttcatccctgtctttaaactgggggtatgtccactctagc

SEQ ID NO: 470 - protein, 1354 aa, Homo sapiens
MSLPRGISQDRSPLVKVRSNSLKAPSTHVTKPSFSQKSFVSIKDQRPVNHLHQNSLLNQQTWVRTDSAPDQQVETGKSPSLSGASAKPAPQSSENAGTSDLELPVSQRSQDLSLQEAETEQSDTLDNKEAVILREKPPSGRQTPQPLRHQSYILAVNDQETGSDTTCWLPNDARREVHIKRMEERKASSTSPPGDSLASIPFIDEPTSPSIDHDIAHIPASAVISASTSQVPSIATVPPCLTTSAPLIRRQLSHDHESVGPPSLDAQPNSKTERSKSYDEGLDDYREDAKLSFKHVSSLKGIKIADSQKSSEDSGSRKDSSSEVFSDAAKEGWLHFRPLVTDKGKRVGGSIRPWKQMYVVLRGHSLYLYKDKREQTTPSEEEQPISVNACLIDISYSETKRKNVFRLTTSDCECLFQAEDRDDMLAWIKTIQESSNLNEEDTGVTNRDLISRRIKEYNNLMSKAEQLPKTPRQSLSIRQTLLGAKSEPKTQSPHSPKEESERKLLSKDDTSPPKDKGTWRKGIPSIMRKTFEKKPTATGTFGVRLDDCPPAHTNRYIPLIVDICCKLVEERGLEYTGIYRVPGNNAAISSMQEELNKGMADIDIQDDKWRDLNVISSLLKSFFRKLPEPLFTNDKYADFIEANRKEDPLDRLKTLKRLIHDLPEHHYETLKFLSAHLKTVAENSEKNKMEPRNLAIVFGPTLVRTSEDNMTHMVTHMPDQYKIVETLIQHHDWFFTEEGAEEPLTTVQEESTVDSQPVPNIDHLLTNIGRTGVSPGDVSDSATSDSTKSKGSWGSGKDQYSRELLVSSIFAAASRKRKKPKEKAQPSSSEDELDNVFFKKENVEQCHNDTKEESKKESETLGRKQKIIIAKENSTRKDPSTTKDEKISLGKESTPSEEPSPPHNSKHNKSPTLSCRFAILKESPRSLLAQKSSHLEETGSDSGTLLSTSSQASLARFSMKKSTSPETKHSEFLANVSTITSDYSTTSSATYLTSLDSSRLSPEVQSVAESKGDEADDERSELISEGRPVETDSESEFPVFPTALTSERLFRGKLQEVTKSSRRNSEGSELSCTEGSLTSSLDSRRQLFSSHKLIECDTLSRKKSARFKSDSGSLGDAKNEKEAPSLTKVFDVMKKGKSTGSLLTPTRGESEKQEPTWKTKIADRLKLRPRAPADDMFGVGNHKVNAETAKRKSIRRRHTLGGHRDATEISVLNFWKVHEQSGERESELSAVNRLKPKCSAQDLSISDWLARERLRTSTSDLSRGEIGDPQTENPSTREIATTDTPLSLHCNTGSSSSTLASTNRPLLSIPPQSPDQINGESFQNVSKNASSAANAQPHKLSETPGTKAEFHPCL

SEQ ID NO: 471 - DNA, 1602 bp, Homo sapiens
  CDS (60)..(1151)
agaagcgtccgcgccgcgaggaggaggccctgctggtttctgtgcgggctcttgtcaggatggtgaagctgttcatcggaaacctgccccgggaggctacagagcaggagattcgctcactcttcgagcagtatgggaaggtgctggaatgtgacatcattaagaattacggctttgtgcacatagaagacaagacggcagctgaggatgccatacgcaacctgcaccattacaagcttcatggggtgaacatcaacgtggaagccagcaagaataagagcaaaacctcaacaaagttgcatgtgggcaacatcagtcccacctgcaccaataaggagcttcgagccaagtttgaggagtatggtccggtcatcgaatgtgacatcgtgaaagattatgccttcgtacacatggagcgggcagaggatgcagtggaggccatcaggggccttgataacacagagtttcaaggcaaacgaatgcacgtgcagttgtccaccagccggcttaggactgcgcccgggatgggagaccagagcggctgctatcggtgcgggaaagaggggcactggtccaaagagtgtccgatagatcgttcaggccgcgtggcagacttgaccgagcaatataatgagcaatacggagcagtgcgtacgccttacaccatgagctatggggattcattgtattacaacaacgcgtacggagcgctcgatgcctactacaagcgctgccgtgctgcccggtcctatgaggcagtggcagctgcagctgcctccgtgtataattacgcagagcagaccctgtcccagctgccacaagtccagaatacagccatggccagtcacctcacctccacctctctcgatccctacgatagacacctgttgccgacctcaggagctgctgccacagctgctgctgcagcagcagccgctgctgctgttactgcagcttccacttcatattacgggcgggatcggagccccctgcgtcgcgctacagccccagtccccactgttggagagggctacggttacgggcatgagagtgagttgtcccaagcttcagcagccgcgcggaattctctgtacgacatggcccggtatgagcgggagcagtatgccgatcgggcgcggtactcagccttttaaagcttgaggtgggatgtgtgtgggctgaaattccgagctgcggttgtgcatgagaatacacccttcgtggtaccccatctccgggacgttctcggctctgtgcgttcagtccctcaggaaccgtggaccttaatttaccttgctaagttcagaccttctcttcctttcctttcctttcctctcctgcccattttcctgttcttctgtccttcaatacttctgtagcttcccattcatgttctcttctcccagcaggcctcattgtgtgcagaaactgtggtgggggctgtgctgtctcctccctgcctcctgcctcctgcggctgttggatttgggaatgaccttggtgagagtctcactgctccagggtctctttttggtccaaaggctagacctataagttggatcactttttttctttccggtgaaataaatggtttttcaactt

SEQ ID NO: 472 - protein, 364 aa, Homo sapiens
MVKLFIGNLPREATEQEIRSLFEQYGKVLECDIIKNYGFVHIEDKTAAEDAIRNLHHYKLHGVNINVEASKNKSKTSTKLHVGNISPTCTNKELRAKFEEYGPVIECDIVKDYAFVHMERAEDAVEAIRGLDNTEFQGKRMHVQLSTSRLRTAPGMGDQSGCYRCGKEGHWSKECPIDRSGRVADLTEQYNEQYGAVRTPYTMSYGDSLYYNNAYGALDAYYKRCRAARSYEAVAAAAASVYNYAEQTLSQLPQVQNTAMASHLTSTSLDPYDRHLLPTSGAAATAAAAAAAAAAVTAASTSYYGRDRSPLRRATAPVPTVGEGYGYGHESELSQASAAARNSLYDMARYEREQYADRARYSAF

SEQ ID NO: 473 - DNA, 2679 bp, Homo sapiens
  CDS (15)..(1586)
aaaaagacttggtaatggcgacgggtttgtcagagcaccataacatggtgtgggaagtgaagacaaatcagatgcctaatgcagtacagaaactcctgttggtgatggacaagagagcctcaggaatgaatgactcattggagttgctgcagtgtaatgagaatttgccatcttcacctggatataactcctgtgatgaacacatggagcttgatgaccttcctgaacttcaggcagttcaaagtgatcctacccaatctggcatgtaccagctgagttcagatgtttcacatcaagaatacccaagatcatcttggaaccaaaatacctcagacataccagaaactacttaccgtgaaaatgaggtggactggctaacagaattggcaaatatcgcgaccagtccacaaagtccactgatgcagtgctcattttacaatagatcatctcctgtacacatcatagccactagcaaaagtttacattcctatgcacgccctccaccagtgtcctcttcttcgaagagtgaaccagccttccctcaccaccattggaaggaggaaacaccagtaagacacgaaagggcaaatagtgagtcagaatctggcattttctgcatgtcctccctgtcagatgatgatgatttgggatggtgcaattcctggccttcaactgtctggcactgttttttgaaaggcacacgactgtgctttcataagggaagcaataaggaatggcaagatgttgaagattttgctagagctgaaggctgtgataatgaggaagatcttcaaatgggcattcacaagggctatggttctgatggtctaaagttgttatcacatgaagaaagtgtatcatttggcgagtctgtactgaagttgacttttgatcctggtacagtagaagatggtttacttaccgtagagtgtaagctggaccaccctttctatgttaaaaataaaggttggtcatcattttatccaagcttgactgtggtacagcatggcattccatgttgtgaagttcatattggcgatgtatgtctacctcctggacaccccgatgccattaattttgatgattcaggtgtttttgatacatttaaaagctatgacttcacacctatggattcttctgcagtttatgtgttaagtagtatggctcgccagcgtcgtgcatctttgtcttgtggaggacctggtggtcaagactttgcaagatctggattcagtaaaaactgtggctcacctggatcatcacagctctcttccaattctttgtatgctaaagctgtcaaaaaccacagctcagggactgtgagtgccacttctcctaataagtgcaaaagaccaatgaatgccttcatgctttttgccaaaaaatacagagttgaatatactcagatgtatccagggaaagataacagagccataagtgtgatccttggtgacaggtggaagaaaatgaagaatgaagagagaagaatgtacacattagaagcaaaggctttggctgaagaacagaaacgtttaaatcctgactgttggaagaggaaaagaaccaattcaggctcacaacaacattaaaccaggatgcttatgttcttaagtctatatttgcatatacattgactcttgatggaaagacttaagaagatcaaggtctcaccatttgtcctcaattcgtgtgaccataagatactgatagcattgagtcttgaaatgatttaataatatgagtgaggatttgctttctccattagagcattaagctaaaactatcaacattttaaaccaaattgccttatttttcttccaaacttcatatatgtctatcaggtaataataggcttgaaaattgatatcctgtggtgctaaagtacagtagaaagagaggagaagtgtatacatgttttattttaaattgtacgaaaggggaatttaaaaaatatgtaactgctgtttatacattggctccttactgcttattaatctgtattgtacacatgatgaaatgaagcagaagctgggagtcggcctttcctctagtaaccaccacatggctcagcatctgtgccaaacataggcgctcctagtctggtcagtgccaagaggctaccagaacatggggcaggtggctggtgttggtgtcccagcctaagagccacctgctgcagttaccatggcatgctgagttgatgcaccaggtggcagcagccatccgttattatttccaatggagacctagcccaggccaaggtaaagttagttaatagcattgggatatagtcactgtaatggtgctattaacaaacagtcaacaccattgtattttttaacttcgtgatctgtatctcctcagccatgtatcttaaatatattttgtcatcataatctttatggtgggggcagactttgcacttactgcagtgcaacacttgcactttaattttcctccaactgtctaaaattagagcaaatacattggcaatacagctgcttttgctctgagctacaatcatggcttttcatgttacttaccaagtggtgtttctggttaggaatcacagctgtaaaattgatttcagttcatcacacttcttcatgatgttgcccctaaattttgcacactatattcttgtatattatttcaaataaatggaaaaaaaagttgctt

SEQ ID NO: 474 - protein, 524 aa, Homo sapiens
MATGLSEHHNMVWEVKTNQMPNAVQKLLLVMDKRASGMNDSLELLQCNENLPSSPGYNSCDEHMELDDLPELQAVQSDPTQSGMYQLSSDVSHQEYPRSSWNQNTSDIPETTYRENEVDWLTELANIATSPQSPLMQCSFYNRSSPVHIIATSKSLHSYARPPPVSSSSKSEPAFPHHHWKEETPVRHERANSESESGIFCMSSLSDDDDLGWCNSWPSTVWHCFLKGTRLCFHKGSNKEWQDVEDFARAEGCDNEEDLQMGIHKGYGSDGLKLLSHEESVSFGESVLKLTFDPGTVEDGLLTVECKLDHPFYVKNKGWSSFYPSLTVVQHGIPCCEVHIGDVCLPPGHPDAINFDDSGVFDTFKSYDFTPMDSSAVYVLSSMARQRRASLSCGGPGGQDFARSGFSKNCGSPGSSQLSSNSLYAKAVKNHSSGTVSATSPNKCKRPMNAFMLFAKKYRVEYTQMYPGKDNRAISVILGDRWKKMKNEERRMYTLEAKALAEEQKRLNPDCWKRKRTNSGSQQH

SEQ ID NO: 475 - DNA, 1496 bp, Homo sapiens
  CDS (93)..(851)
ggcacgaggcggacgcgtggtagcctagagtcctggggagcttctgtccacctgtcctgcagaggagtcgtttccagcccggctgccccaggatgggtgagttcaacgagaagaagacaacatgtggcaccgtttgcctcaagtacctgctgtttacctacaattgctgcttctggctggctggcctggctgtcatggcagtgggcatctggacgctggccctcaagagtgactacatcagcctgctggcctcaggcacctacctggccacagcctacatcctggtggtggcgggcactgtcgtcatggtgactggggtcttgggctgctgcgccaccttcaaggagcgtcggaacctgctgcgcctgtacttcatcctgctcctcatcatctttctgctggagatcatcgctggtatcctcgcctacgcctactaccagcagctgaacacggagctcaaggagaacctgaaggacaccatgaccaagcgctaccaccagccgggccatgaggctgtgaccagcgctgtggaccagctgcagcaggagttccactgctgtggcagcaacaactcacaggactggcgagacagtgagtggatccgctcacaggaggccggtggccgtgtggtcccagacagctgctgcaagacggtggtggctctttgtggacagcgagaccatgcctccaacatctacaaggtggagggcggctgcatcaccaagttggagaccttcatccaggagcacctgagggtcattggggctgtggggatcggcattgcctgtgtgcaggtctttggcatgatcttcacgtgctgcctgtacaggagtctcaagctggagcactactgaccctgccttgggccttgctgctgctgcacccaactactgagctgagaccactgagtaccaggggctgggctccctgatgacacccaccctgtgccatcaccataacctctggggaccccaacctcagaggcagcttcaagtgccttttgctgcgcaccaatgcccagcaggggaggtgaggggggctggcggggcgaagtttggggggtgttttgtggggctccccggacatactctctgcctggtggtcagatgcaggttggaaggggccttgctgagtggcgcaaggccgagcgttcccagcagggggagaaacccttcacaccccaggcccttcaggaactggggctttgccttgcagccacatggccccatcccagttggggaagccaggtgagctctgacccttgggcctgggcctctgcccctcccaacccagccgtcgtctccctcgacagcgcccctgctgtcttccccaccgcagtcaccaccacccgaaatgccacgtggtcactgtgcactgccctgttcatgtgcctctgcggggcagggccttcctggttttgtacactgctgtacccagatgcctacaaccatccctgccacatacaggtgctcaataaacacttgtagagcagatgg

SEQ ID NO: 476 - protein, 253 aa, Homo sapiens
MGEFNEKKTTCGTVCLKYLLFTYNCCFWLAGLAVMAVGIWTLALKSDYISLLASGTYLATAYILVVAGTVVMVTGVLGCCATFKERRNLLRLYFILLLIIFLLEIIAGILAYAYYQQLNTELKENLKDTMTKRYHQPGHEAVTSAVDQLQQEFHCCGSNNSQDWRDSEWIRSQEAGGRVVPDSCCKTVVALCGQRDHASNIYKVEGGCITKLETFIQEHLRVIGAVGIGIACVQVFGMIFTCCLYRSLKLEHY

SEQ ID NO: 477 - DNA, 1455 bp, Homo sapiens
  CDS (83)..(709)
aaaaaaaaagctgggagccgccgcccccgcagctgctgccgccgccgccagggcccggactcggacgcgtggtagccccaggatgggtgagttcaacgagaagaagacaacatgtggcaccgtttgcctcaagtacctgctgtttacctacaattgctgcttctggctggctggcctggctgtcatggcagtgggcatctggacgctggccctcaagagtgactacatcagcctgctggcctcaggcacctacctggccacagcctacatcctggtggtggcgggcactgtcgtcatggtgactggggtcttgggctgctgcgccaccttcaaggagcgtcggaacctgctgcgcctgtacttcatcctgctcctcatcatctttctgctggagatcatcgctggtatcctcgcctacgcctactaccagcagctgaacacggagctcaaggagaacctgaaggacaccatgaccaagcgctaccaccagccgggccatgaggctgtgaccagcgctgtggcagcaacaactcacaggactggcgagacagtgagtggatccgctcacaggaggccggtggccgtgtggtcccagacagctgctgcaagacggtggtggctctttgtggacagcgagaccatgcctccaacatctacaaggtggagggcggctgcatcaccaagttggagaccttcatccaggagcacctgagggtcattggggctgtggggatcggcattgcctgtgtgcaggtctttggcatgatcttcacgtgctgcctgtacaggagtctcaagctggagcactactgaccctgccttgggccttgctgctgctgcacccaactactgagctgagaccactgagtaccaggggctgggctccctgatgacacccaccctgtgccatcaccataacctctggggaccccaacctcagaggcagcttcaagtgccttttgctgcgcaccaatgcccagcaggggaggtgaggggggctggcggggcgaagtttggggggtgttttgtggggctccccagacacactctctgcctggtggtcagatgcaggttggaaggggccttgctgagtggcgcaaggccgagcgttcccagcagggggagaaacccttcacaccccaggcccttcaggaactggggccttgccttgcagccacatggccccatcccagttggggaagccaggtgagctctgacccttgggcctgggcctctgcccctcccaacccagccctcgtctccctcgacagcgcccctgctgtcttccccaccgcagtcaccaccacccgaaatgccacgtggtcactgtgcactgccctgtccatgtgcctctgcggggcagggccttcctggttttgttcactgctgtacccagatgcctacaaccatccctgccacatacaggtgctcaataaacacttgtagagcagatgg

SEQ ID NO: 478 - protein, 209 aa, Homo sapiens
MGEFNEKKTTCGTVCLKYLLFTYNCCFWLAGLAVMAVGIWTLALKSDYISLLASGTYLATAYILVVAGTVVMVTGVLGCCATFKERRNLLRLYFILLLIIFLLEIIAGILAYAYYQQLNTELKENLKDTMTKRYHQPGHEAVTSAVAATTHRTGETVSGSAHRRPVAVWSQTAAARRWWLFVDSETMPPTSTRWRAAASPSWRPSSRST

SEQ ID NO: 479 - DNA, 1758 bp, Homo sapiens
  CDS (79)..(1578)
atcccctccggttttcctcagtctccacgtacgtccctcaaagcgcgtcctaaaacccggataaccggagcgctccccatggaccacacggagggcttgcccgcggaggagccgcctgcgcatgctccatcgcctgggaaatttggtgagcggcctccacctaaacgacttactagggaagctatgcgaaattatttaaaagagcgaggggatcaaacagtacttattcttcatgcaaaagttgcacagaagtcatatggaaatgaaaaaaggtttttttgcccacctccttgtgtatatcttatgggcagcggatggaagaaaaaaaaagaacaaatggaacgcgatggttgttctgaacaagagtctcaaccgtgtgcatttattgggataggaaatagtgaccaagaaatgcagcagctaaacttggaaggaaagaactattgcacagccaaaacattgtatatatctgactcagacaagcgaaagcacttcatgttgtctgtaaagatgttctatggcaacagtgatgacattggtgtgttcctcagcaagcggataaaagtcatctccaaaccttccaaaaagaagcagtcattgaaaaatgctgacttatgcattgcctcaggaacaaaggtggctctgtttaatcgactacgatcccagacagttagtaccagatacttgcatgtagaaggaggtaattttcatgccagttcacagcagtggggagccttttttattcatctcttggatgatgatgaatcagaaggagaagaattcacagtccgagatggctacatccattatggacaaacagtcaaacttgtgtgctcagttactggcatggcactcccaagattgataattaggaaagttgataagcagaccgcattattggatgcagatgatcctgtgtcacaactccataaatgtgcattttaccttaaggatacagaaagaatgtatttgtgcctttctcaagaaagaataattcaatttcaggccactccatgtccaaaagaaccaaataaagagatgataaatgatggcgcttcctggacaatcattagcacagataaggcagagtatacattttatgagggaatgggccctgtccttgccccagtcactcctgtgcctgtggtagagagccttcagttgaatggcggtggggacgtagcaatgcttgaacttacaggacagaatttcactccaaatttacgagtgtggtttggggatgtagaagctgaaactatgtacaggtgtggagagagtatgctctgtgtcgtcccagacatttctgcattccgagaaggttggagatgggtccggcaaccagtccaggttccagtaactttggtccgaaatgatggaatcatttattccaccagccttacctttacctacacaccagaaccagggccgcggccacattgcagtgcagcaggagcaatccttcgagccaattcaagccaggtgccccctaacgaatcaaacacaaacagcgagggaagttacacaaacgccagcacaaattcaaccagtgtcacatcatctacagccacagtggtatcctaactaccgtctttttgctaggacttaaactgacttgagtgtggcaaaaagttaacaaaaaaggagaaaaaatgaacaatcgtttgtggtttcttgggaaaacttttcataccaggtgatactattcaaaaaccccgttgtctccctgcaagtgctgatttgaaatgcagaagccccagt

SEQ ID NO: 480 - protein, 500 aa, Homo sapiens
MDHTEGLPAEEPPAHAPSPGKFGERPPPKRLTREAMRNYLKERGDQTVLILHAKVAQKSYGNEKRFFCPPPCVYLMGSGWKKKKEQMERDGCSEQESQPCAFIGIGNSDQEMQQLNLEGKNYCTAKTLYISDSDKRKHFMLSVKMFYGNSDDIGVFLSKRIKVISKPSKKKQSLKNADLCIASGTKVALFNRLRSQTVSTRYLHVEGGNFHASSQQWGAFFIHLLDDDESEGEEFTVRDGYIHYGQTVKLVCSVTGMALPRLIIRKVDKQTALLDADDPVSQLHKCAFYLKDTERMYLCLSQERIIQFQATPCPKEPNKEMINDGASWTIISTDKAEYTFYEGMGPVLAPVTPVPVVESLQLNGGGDVAMLELTGQNFTPNLRVWFGDVEAETMYRCGESMLCVVPDISAFREGWRWVRQPVQVPVTLVRNDGIIYSTSLTFTYTPEPGPRPHCSAAGAILRANSSQVPPNESNTNSEGSYTNASTNSTSVTSSTATVVS

SEQ ID NO: 481 - DNA, 1450 bp, Homo sapiens
  CDS (112)..(1224)
gaaagagccgagtgggctcgaggccgacgcgaccatcgtttgtcgacgccgctgccaccgcctgcctgagagaagtcgtcgcggccgaccccgtcgcctccgccggctaccatgtccgcccaggcgcagatgcgggccctgctggaccagctcatgggcacggctcgggacggagacgaaaccagacagagggtcaagtttacagatgaccgtgtctgcaagagtcaccttctggactgctgcccccatgacatcctggctgggacgcgcatggatttaggagaatgtaccaaaatccacgacttggccctccgagcagattatgagattgcaagtaaagaaagagacctgttttttgaattagatgcaatggatcacttggagtcctttattgctgaatgtgatcggagaactgagctcgccaagaagcggctggcagaaacacaggaggaaatcagtgcggaagtttctgcaaaggcagaaaaagtacatgagttaaatgaagaaataggaaaactccttgctaaagccgaacagctaggggctgaaggtaatgtggatgaatcccagaagattcttatggaagtggaaaaagttcgtgcgaagaaaaaagaagctgaggaagaatacagaaattccatgcctgcatccagttttcagcagcaaaagctgcgtgtctgcgaggtctgttcagcctaccttggtctccatgacaatgaccgtcgcctggcagaccacttcggtggcaagttacacttggggttcattcagatccgagagaagcttgatcagttgaggaaaactgtcgctgaaaagcaggagaagagaaatcaggatcgcttgaggaggagagaggagagggaacgggaggagcgtctgagcaggaggtcgggatcaagaaccagagatcgcaggaggtcacgctcccgggatcggcgtcggaggcggtcaagatctacctcccgagagcgacggaaattgtcccggtcccggtcccgagatagacatcggcgccaccgcagccgttcccggagccacagccggggacatcgtcgggcttcccgggaccgaagtgcgaaatacaagttctccagagagcgggcatccagagaggagtcctgggagagcgggcggagcgagcgagggcccccggactggaggcttgagagctccaacgggaagatggcttcacggaggtcagaagagaaggaggccggcgagatctgaacccgtctcccgggtgctgtaaatagtctgataaacgttcacacagtctaaaattaccctttatatttgctgaatacaactcatcttttgtagtttaaaatttctattgttttggagctagctgtgagtttctagaagtgtacagagttgctcctgtgttcccgggtcatgttgagtaggaataaataaatctgatgctgcctcctgaggctgcggggggttt

SEQ ID NO: 482 - protein, 371 aa, Homo sapiens
MSAQAQMRALLDQLMGTARDGDETRQRVKFTDDRVCKSHLLDCCPHDILAGTRMDLGECTKIHDLALRADYEIASKERDLFFELDAMDHLESFIAECDRRTELAKKRLAETQEEISAEVSAKAEKVHELNEEIGKLLAKAEQLGAEGNVDESQKILMEVEKVRAKKKEAEEEYRNSMPASSFQQQKLRVCEVCSAYLGLHDNDRRLADHFGGKLHLGFIQIREKLDQLRKTVAEKQEKRNQDRLRRREEREREERLSRRSGSRTRDRRRSRSRDRRRRRSRSTSRERRKLSRSRSRDRHRRHRSRSRSHSRGHRRASRDRSAKYKFSRERASREESWESGRSERGPPDWRLESSNGKMASRRSEEKEAGEI

SEQ ID NO: 483 - DNA, 717 bp, Homo sapiens
  CDS (53)..(664)
gggagtacagctctttcctttccgtctggcggcagccatcaggtaagccaagatgggtgcatacaagtacatccaggagctatggagaaagaagcagtctgatgtcatgcgctttcttctgagggtccgctgctggcagtaccgccagctctctgctctccacagggctccccgccccacccggcctgataaagcgcgccgactgggctacaaggccaagcaaggttacgttatatataggattcgtgttcgccgtggtggccgaaaacgcccagttcctaagggtgcaacttacggcaagcctgtccatcatggtgttaaccagctaaagtttgctcgaagccttcagtccgttgcagaggagcgagctggacgccactgtggggctctgagagtcctgaattcttactgggttggtgaagattccacatacaaattttttgaggttatcctcattgatccattccataaagctatcagaagaaatcctgacacccagtggatcaccaaaccagtccacaagcacagggagatgcgtgggctgacatctgcaggccgaaagagccgtggccttggaaagggccacaagttccaccacactattggtggctctcgccgggcagcttggagaaggcgcaatactctccagctccaccgttaccgctaatataagtaaagtttgtaaaattcatacttaataaacaatttaggacagtc

SEQ ID NO: 484 - protein, 204 aa, Homo sapiens [sequence omitted]

SEQ ID NO: 485 - DNA, 28 bp, Artificial Sequence
  Description of Artificial Sequence:Primer
tcgagctcttcttcccaggaactcaatg

SEQ ID NO: 486 - DNA, 28 bp, Artificial Sequence
  Description of Artificial Sequence:Primer
tcgacattgagttcctgggaagaagagc

SEQ ID NO: 487 - DNA, 20 bp, Artificial Sequence
  Description of Artificial Sequence:Primer
cttctgctctaaaagctgcg

SEQ ID NO: 488 - DNA, 20 bp, Artificial Sequence
  Description of Artificial Sequence:Primer
cgacctgcagctcgagcaca
